United States Patent Application Publication US 2026/0286360 A1, published September 24, 2026 (application 19/575,786).

The application's sequence listing, which the Patent Office published only in electronic form, follows.

SEQUENCE LISTING (3991 sequences)

SEQ ID NO: 1 - DNA, 16 bp, synthetic construct
  source 1..16: mol_type = other DNA
  modified_base 1..3: mod_base = OTHER; note = locked nucleic acid
  modified_base 15..16: mod_base = OTHER; note = locked nucleic acid
  modified_base 1..16: mod_base = OTHER; note = phosphorothioate linkage
  misc_feature 1..3: note = RNA
  misc_feature 4..14: note = DNA
  misc_feature 15..16: note = RNA
gtaatgcctagcagtg

SEQ ID NO: 2 - DNA, 16 bp, synthetic construct
  source 1..16: mol_type = other DNA
  modified_base 1..3: mod_base = OTHER; note = locked nucleic acid
  modified_base 15..16: mod_base = OTHER; note = locked nucleic acid
  modified_base 1..16: mod_base = OTHER; note = phosphorothioate linkage
  misc_feature 1..3: note = RNA
  misc_feature 4..14: note = DNA
  misc_feature 15..16: note = RNA
cgaatccagacccaag

SEQ ID NO: 3 - DNA, 16 bp, synthetic construct
  source 1..16: mol_type = other DNA
  modified_base 1..3: mod_base = OTHER; note = locked nucleic acid
  modified_base 15..16: mod_base = OTHER; note = locked nucleic acid
  modified_base 1..16: mod_base = OTHER; note = phosphorothioate linkage
  misc_feature 1..3: note = RNA
  misc_feature 4..14: note = DNA
  misc_feature 15..16: note = RNA
ggcatactcaatagct

SEQ ID NO: 4 - DNA, 16 bp, synthetic construct
  source 1..16: mol_type = other DNA
  modified_base 1..3: mod_base = OTHER; note = locked nucleic acid
  modified_base 15..16: mod_base = OTHER; note = locked nucleic acid
  modified_base 1..16: mod_base = OTHER; note = phosphorothioate linkage
  misc_feature 1..3: note = RNA
  misc_feature 4..14: note = DNA
  misc_feature 15..16: note = RNA
caagctgaataggacc

SEQ ID NO: 5 - DNA, 16 bp, synthetic construct
  source 1..16: mol_type = other DNA
  modified_base 1..3: mod_base = OTHER; note = locked nucleic acid
  modified_base 15..16: mod_base = OTHER; note = locked nucleic acid
  modified_base 1..16: mod_base = OTHER; note = phosphorothioate linkage
  misc_feature 1..3: note = RNA
  misc_feature 4..14: note = DNA
  misc_feature 15..16: note = RNA
cttaagggtgctggtc

SEQ ID NO: 6 - DNA, 16 bp, synthetic construct
  source 1..16: mol_type = other DNA
  modified_base 1..3: mod_base = OTHER; note = locked nucleic acid
  modified_base 15..16: mod_base = OTHER; note = locked nucleic acid
  modified_base 1..16: mod_base = OTHER; note = phosphorothioate linkage
  misc_feature 1..3: note = RNA
  misc_feature 4..14: note = DNA
  misc_feature 15..16: note = RNA
gcatctgttgtgagtc

SEQ ID NO: 7 - DNA, 16 bp, synthetic construct
  source 1..16: mol_type = other DNA
  modified_base 1..3: mod_base = OTHER; note = locked nucleic acid
  modified_base 15..16: mod_base = OTHER; note = locked nucleic acid
  modified_base 1..16: mod_base = OTHER; note = phosphorothioate linkage
  misc_feature 1..3: note = RNA
  misc_feature 4..14: note = DNA
  misc_feature 15..16: note = RNA
ctatctagtgaacacc

SEQ ID NO: 8 - DNA, 16 bp, synthetic construct
  source 1..16: mol_type = other DNA
  modified_base 1..3: mod_base = OTHER; note = locked nucleic acid
  modified_base 15..16: mod_base = OTHER; note = locked nucleic acid
  modified_base 1..16: mod_base = OTHER; note = phosphorothioate linkage
  misc_feature 1..3: note = RNA
  misc_feature 4..14: note = DNA
  misc_feature 15..16: note = RNA
gggtcgaagtctgaac

SEQ ID NO: 9 - DNA, 16 bp, synthetic construct
  source 1..16: mol_type = other DNA
  modified_base 1..3: mod_base = OTHER; note = locked nucleic acid
  modified_base 15..16: mod_base = OTHER; note = locked nucleic acid
  modified_base 1..16: mod_base = OTHER; note = phosphorothioate linkage
  misc_feature 1..3: note = RNA
  misc_feature 4..14: note = DNA
  misc_feature 15..16: note = RNA
gtagtcctggtttaga

SEQ ID NO: 10 - DNA, 16 bp, synthetic construct
  source 1..16: mol_type = other DNA
  modified_base 1..3: mod_base = OTHER; note = locked nucleic acid
  modified_base 15..16: mod_base = OTHER; note = locked nucleic acid
  modified_base 1..16: mod_base = OTHER; note = phosphorothioate linkage
  misc_feature 1..3: note = RNA
  misc_feature 4..14: note = DNA
  misc_feature 15..16: note = RNA
gtcagatccttggtat

SEQ ID NO: 11 - DNA, 16 bp, synthetic construct
  source 1..16: mol_type = other DNA
  modified_base 1..3: mod_base = OTHER; note = locked nucleic acid
  modified_base 15..16: mod_base = OTHER; note = locked nucleic acid
  modified_base 1..16: mod_base = OTHER; note = phosphorothioate linkage
  misc_feature 1..3: note = RNA
  misc_feature 4..14: note = DNA
  misc_feature 15..16: note = RNA
gatcattgtagcagac

SEQ ID NO: 12 - DNA, 16 bp, synthetic construct
  source 1..16: mol_type = other DNA
  modified_base 1..3: mod_base = OTHER; note = locked nucleic acid
  modified_base 15..16: mod_base = OTHER; note = locked nucleic acid
  modified_base 1..16: mod_base = OTHER; note = phosphorothioate linkage
  misc_feature 1..3: note = RNA
  misc_feature 4..14: note = DNA
  misc_feature 15..16: note = RNA
gtgtcaagggtaagtc

SEQ ID NO: 13 - DNA, 16 bp, synthetic construct
  source 1..16: mol_type = other DNA
  modified_base 1..3: mod_base = OTHER; note = locked nucleic acid
  modified_base 15..16: mod_base = OTHER; note = locked nucleic acid
  modified_base 1..16: mod_base = OTHER; note = phosphorothioate linkage
  misc_feature 1..3: note = RNA
  misc_feature 4..14: note = DNA
  misc_feature 15..16: note = RNA
ggtagtgtttaggtac

SEQ ID NO: 14 - DNA, 16 bp, synthetic construct
  source 1..16: mol_type = other DNA
  modified_base 1..3: mod_base = OTHER; note = locked nucleic acid
  modified_base 15..16: mod_base = OTHER; note = locked nucleic acid
  modified_base 1..16: mod_base = OTHER; note = phosphorothioate linkage
  misc_feature 1..3: note = RNA
  misc_feature 4..14: note = DNA
  misc_feature 15..16: note = RNA
ccattagtagaccatg

SEQ ID NO: 15 - DNA, 16 bp, synthetic construct
  source 1..16: mol_type = other DNA
  modified_base 1..3: mod_base = OTHER; note = locked nucleic acid
  modified_base 15..16: mod_base = OTHER; note = locked nucleic acid
  modified_base 1..16: mod_base = OTHER; note = phosphorothioate linkage
  misc_feature 1..3: note = RNA
  misc_feature 4..14: note = DNA
  misc_feature 15..16: note = RNA
ctatcttagacccagc

SEQ ID NO: 16 - DNA, 16 bp, synthetic construct
  source 1..16: mol_type = other DNA
  modified_base 1..3: mod_base = OTHER; note = locked nucleic acid
  modified_base 15..16: mod_base = OTHER; note = locked nucleic acid
  modified_base 1..16: mod_base = OTHER; note = phosphorothioate linkage
  misc_feature 1..3: note = RNA
  misc_feature 4..14: note = DNA
  misc_feature 15..16: note = RNA
gcactaattaaccctt

SEQ ID NO: 17 - DNA, 16 bp, synthetic construct
  source 1..16: mol_type = other DNA
  modified_base 1..3: mod_base = OTHER; note = locked nucleic acid
  modified_base 15..16: mod_base = OTHER; note = locked nucleic acid
  modified_base 1..16: mod_base = OTHER; note = phosphorothioate linkage
  misc_feature 1..3: note = RNA
  misc_feature 4..14: note = DNA
  misc_feature 15..16: note = RNA
ttatcatcagtctagg

SEQ ID NO: 18 - DNA, 16 bp, synthetic construct
  source 1..16: mol_type = other DNA
  modified_base 1..3: mod_base = OTHER; note = locked nucleic acid
  modified_base 15..16: mod_base = OTHER; note = locked nucleic acid
  modified_base 1..16: mod_base = OTHER; note = phosphorothioate linkage
  misc_feature 1..3: note = RNA
  misc_feature 4..14: note = DNA
  misc_feature 15..16: note = RNA
ctccgactgtgcaatg

SEQ ID NO: 19 - DNA, 16 bp, synthetic construct
  source 1..16: mol_type = other DNA
  modified_base 1..3: mod_base = OTHER; note = locked nucleic acid
  modified_base 15..16: mod_base = OTHER; note = locked nucleic acid
  modified_base 1..16: mod_base = OTHER; note = phosphorothioate linkage
  misc_feature 1..3: note = RNA
  misc_feature 4..14: note = DNA
  misc_feature 15..16: note = RNA
gcagcatataactctc

SEQ ID NO: 20 - DNA, 16 bp, synthetic construct
  source 1..16: mol_type = other DNA
  modified_base 1..3: mod_base = OTHER; note = locked nucleic acid
  modified_base 15..16: mod_base = OTHER; note = locked nucleic acid
  modified_base 1..16: mod_base = OTHER; note = phosphorothioate linkage
  misc_feature 1..3: note = RNA
  misc_feature 4..14: note = DNA
  misc_feature 15..16: note = RNA
atgacagacctcgtgt

SEQ ID NO: 21 - DNA, 16 bp, synthetic construct
  source 1..16: mol_type = other DNA
  modified_base 1..3: mod_base = OTHER; note = locked nucleic acid
  modified_base 15..16: mod_base = OTHER; note = locked nucleic acid
  modified_base 1..16: mod_base = OTHER; note = phosphorothioate linkage
  misc_feature 1..3: note = RNA
  misc_feature 4..14: note = DNA
  misc_feature 15..16: note = RNA
gaatgtagctccttag

SEQ ID NO: 22 - DNA, 16 bp, synthetic construct
  source 1..16: mol_type = other DNA
  modified_base 1..3: mod_base = OTHER; note = locked nucleic acid
  modified_base 15..16: mod_base = OTHER; note = locked nucleic acid
  modified_base 1..16: mod_base = OTHER; note = phosphorothioate linkage
  misc_feature 1..3: note = RNA
  misc_feature 4..14: note = DNA
  misc_feature 15..16: note = RNA
ggatcaactacagggc

SEQ ID NO: 23 - DNA, 16 bp, synthetic construct
  source 1..16: mol_type = other DNA
  modified_base 1..3: mod_base = OTHER; note = locked nucleic acid
  modified_base 15..16: mod_base = OTHER; note = locked nucleic acid
  modified_base 1..16: mod_base = OTHER; note = phosphorothioate linkage
  misc_feature 1..3: note = RNA
  misc_feature 4..14: note = DNA
  misc_feature 15..16: note = RNA
ccactgagtataactc

SEQ ID NO: 24 - DNA, 16 bp, synthetic construct
  source 1..16: mol_type = other DNA
  modified_base 1..3: mod_base = OTHER; note = locked nucleic acid
  modified_base 15..16: mod_base = OTHER; note = locked nucleic acid
  modified_base 1..16: mod_base = OTHER; note = phosphorothioate linkage
  misc_feature 1..3: note = RNA
  misc_feature 4..14: note = DNA
  misc_feature 15..16: note = RNA
agactctaaagctccg

SEQ ID NO: 25 - DNA, 16 bp, synthetic construct
  source 1..16: mol_type = other DNA
  modified_base 1..3: mod_base = OTHER; note = locked nucleic acid
  modified_base 15..16: mod_base = OTHER; note = locked nucleic acid
  modified_base 1..16: mod_base = OTHER; note = phosphorothioate linkage
  misc_feature 1..3: note = RNA
  misc_feature 4..14: note = DNA
  misc_feature 15..16: note = RNA
caaacccgccatccac

SEQ ID NO: 26 - DNA, 16 bp, synthetic construct
  source 1..16: mol_type = other DNA
  modified_base 1..3: mod_base = OTHER; note = locked nucleic acid
  modified_base 15..16: mod_base = OTHER; note = locked nucleic acid
  modified_base 1..16: mod_base = OTHER; note = phosphorothioate linkage
  misc_feature 1..3: note = RNA
  misc_feature 4..14: note = DNA
  misc_feature 15..16: note = RNA
gtctgatcctagcacc

SEQ ID NO: 27 - DNA, 16 bp, synthetic construct
  source 1..16: mol_type = other DNA
  modified_base 1..3: mod_base = OTHER; note = locked nucleic acid
  modified_base 15..16: mod_base = OTHER; note = locked nucleic acid
  modified_base 1..16: mod_base = OTHER; note = phosphorothioate linkage
  misc_feature 1..3: note = RNA
  misc_feature 4..14: note = DNA
  misc_feature 15..16: note = RNA
agcataactcagccgt

SEQ ID NO: 28 - DNA, 16 bp, synthetic construct
  source 1..16: mol_type = other DNA
  modified_base 1..3: mod_base = OTHER; note = locked nucleic acid
  modified_base 15..16: mod_base = OTHER; note = locked nucleic acid
  modified_base 1..16: mod_base = OTHER; note = phosphorothioate linkage
  misc_feature 1..3: note = RNA
  misc_feature 4..14: note = DNA
  misc_feature 15..16: note = RNA
tcttacgtgtctgaag

SEQ ID NO: 29 - DNA, 16 bp, synthetic construct
  source 1..16: mol_type = other DNA
ttaccttgagtgaccc

SEQ ID NO: 30 - DNA, 16 bp, synthetic construct
  source 1..16: mol_type = other DNA
gtcattgtatagccag

SEQ ID NO: 31 - DNA, 16 bp, synthetic construct
  source 1..16: mol_type = other DNA
  modified_base 1..3: mod_base = OTHER; note = locked nucleic acid
  modified_base 15..16: mod_base = OTHER; note = locked nucleic acid
  modified_base 1..16: mod_base = OTHER; note = phosphorothioate linkage
  misc_feature 1..3: note = RNA
  misc_feature 4..14: note = DNA
  misc_feature 15..16: note = RNA
gaccctagcacttgag

SEQ ID NO: 32 - DNA, 16 bp, synthetic construct
  source 1..16: mol_type = other DNA
  modified_base 1..3: mod_base = OTHER; note = locked nucleic acid
  modified_base 15..16: mod_base = OTHER; note = locked nucleic acid
  modified_base 1..16: mod_base = OTHER; note = phosphorothioate linkage
  misc_feature 1..3: note = RNA
  misc_feature 4..14: note = DNA
  misc_feature 15..16: note = RNA
tgaagtagccatagcc

SEQ ID NO: 33 - DNA, 16 bp, synthetic construct
  source 1..16: mol_type = other DNA
  modified_base 1..3: mod_base = OTHER; note = locked nucleic acid
  modified_base 15..16: mod_base = OTHER; note = locked nucleic acid
  modified_base 1..16: mod_base = OTHER; note = phosphorothioate linkage
  misc_feature 1..3: note = RNA
  misc_feature 4..14: note = DNA
  misc_feature 15..16: note = RNA
gaagattacctagcag

SEQ ID NO: 34 - DNA, 16 bp, synthetic construct
  source 1..16: mol_type = other DNA
  modified_base 1..3: mod_base = OTHER; note = locked nucleic acid
  modified_base 15..16: mod_base = OTHER; note = locked nucleic acid
  modified_base 1..16: mod_base = OTHER; note = phosphorothioate linkage
  misc_feature 1..3: note = RNA
  misc_feature 4..14: note = DNA
  misc_feature 15..16: note = RNA
gcagtaccagaactat

SEQ ID NO: 35 - DNA, 16 bp, synthetic construct
  source 1..16: mol_type = other DNA
  modified_base 1..3: mod_base = OTHER; note = locked nucleic acid
  modified_base 15..16: mod_base = OTHER; note = locked nucleic acid
  modified_base 1..16: mod_base = OTHER; note = phosphorothioate linkage
  misc_feature 1..3: note = RNA
  misc_feature 4..14: note = DNA
  misc_feature 15..16: note = RNA
gtcaccacatgttagt

SEQ ID NO: 36 - DNA, 16 bp, synthetic construct
  source 1..16: mol_type = other DNA
  modified_base 1..3: mod_base = OTHER; note = locked nucleic acid
  modified_base 15..16: mod_base = OTHER; note = locked nucleic acid
  modified_base 1..16: mod_base = OTHER; note = phosphorothioate linkage
  misc_feature 1..3: note = RNA
  misc_feature 4..14: note = DNA
  misc_feature 15..16: note = RNA
tcagatagagttagac

SEQ ID NO: 37 - DNA, 16 bp, synthetic construct
  source 1..16: mol_type = other DNA
  modified_base 1..3: mod_base = OTHER; note = locked nucleic acid
  modified_base 15..16: mod_base = OTHER; note = locked nucleic acid
  modified_base 1..16: mod_base = OTHER; note = phosphorothioate linkage
  misc_feature 1..3: note = RNA
  misc_feature 4..14: note = DNA
  misc_feature 15..16: note = RNA
ctcagtctggtcgtgc

SEQ ID NO: 38 - DNA, 16 bp, synthetic construct
  source 1..16: mol_type = other DNA
acagataagtgaacga

SEQ ID NO: 39 - DNA, 16 bp, synthetic construct
  source 1..16: mol_type = other DNA
gatagagttagacata

SEQ ID NO: 40 - DNA, 16 bp, synthetic construct
  source 1..16: mol_type = other DNA
cgtagaagaggtcggt

SEQ ID NO: 41 - DNA, 20 bp, synthetic construct
  source 1..20: mol_type = other DNA
cagtcccaccaatcacctgc

SEQ ID NO: 42 - DNA, 16 bp, synthetic construct
  source 1..16: mol_type = other DNA
gtgtgcctcttagacc

SEQ ID NO: 43 - DNA, 20 bp, synthetic construct
  source 1..20: mol_type = other DNA
tttaaattcctgagaactgg

SEQ ID NO: 44 - DNA, 20 bp, synthetic construct
  source 1..20: mol_type = other DNA
gtttaaattcctgagaactg

SEQ ID NO: 45 - DNA, 20 bp, synthetic construct
  source 1..20: mol_type = other DNA
ctgaggttggagttggaagc

SEQ ID NO: 46 - DNA, 16 bp, synthetic construct
  source 1..16: mol_type = other DNA
gaggttagggtgtctc

SEQ ID NO: 47 - DNA, 20 bp, synthetic construct
  source 1..20: mol_type = other DNA
gctggaggttagggtgtctc

SEQ ID NO: 48 - DNA, 20 bp, synthetic construct
  source 1..20: mol_type = other DNA
tgctggaggttagggtgtct

SEQ ID NO: 49 - DNA, 20 bp, synthetic construct
  source 1..20: mol_type = other DNA
gtgctggaggttagggtgtc

SEQ ID NO: 50 - DNA, 20 bp, synthetic construct
  source 1..20: mol_type = other DNA
ctaacttctggactatttgc

SEQ ID NO: 51 - DNA, 20 bp, synthetic construct
  source 1..20: mol_type = other DNA
gctaacttctggactatttg

SEQ ID NO: 52 - DNA, 16 bp, synthetic construct
  source 1..16: mol_type = other DNA
gctaacttctggacta

SEQ ID NO: 53 - DNA, 20 bp, synthetic construct
  source 1..20: mol_type = other DNA
cagcccaagcctcttaaaga

SEQ ID NO: 54 - DNA, 20 bp, synthetic construct
  source 1..20: mol_type = other DNA
gcagcccaagcctcttaaag

SEQ ID NO: 55 - DNA, 16 bp, synthetic construct
  source 1..16: mol_type = other DNA
gctagagtgttgctgg

SEQ ID NO: 56 - DNA, 20 bp, synthetic construct
  source 1..20: mol_type = other DNA
tcataaggaaagattgccct

SEQ ID NO: 57 - DNA, 20 bp, synthetic construct
  source 1..20: mol_type = other DNA
ttcataaggaaagattgccc

SEQ ID NO: 58 - DNA, 20 bp, synthetic construct
  source 1..20: mol_type = other DNA
gattcataaggaaagattgc

SEQ ID NO: 59 - DNA, 20 bp, synthetic construct
  source 1..20: mol_type = other DNA
ccaagatgtagaagcaatca

SEQ ID NO: 60 - DNA, 20 bp, synthetic construct
  source 1..20: mol_type = other DNA
cccaagatgtagaagcaatc

SEQ ID NO: 61 - DNA, 20 bp, synthetic construct
  source 1..20: mol_type = other DNA
gcccaagatgtagaagcaat

SEQ ID NO: 62 - DNA, 20 bp, synthetic construct
  source 1..20: mol_type = other DNA
ttgaagcccaagatgtagaa

SEQ ID NO: 63 - DNA, 20 bp, synthetic construct
  source 1..20: mol_type = other DNA
tttgaagcccaagatgtaga

SEQ ID NO: 64 - DNA, 20 bp, synthetic construct
  source 1..20: mol_type = other DNA
ttggtgcaagagagaatccc

SEQ ID NO: 65 - DNA, 20 bp, synthetic construct
  source 1..20: mol_type = other DNA
gttggtgcaagagagaatcc

SEQ ID NO: 66 - DNA, 20 bp, synthetic construct
  source 1..20: mol_type = other DNA
gtgcaaggatactctatatc

SEQ ID NO: 67 - DNA, 20 bp, synthetic construct
  source 1..20: mol_type = other DNA
tttgggagtgcaaggatact

SEQ ID NO: 68 - DNA, 20 bp, synthetic construct
  source 1..20: mol_type = other DNA
ccattccaactcccaaattg

SEQ ID NO: 69 - DNA, 20 bp, synthetic construct
  source 1..20: mol_type = other DNA
caaatattcctaagctccat

SEQ ID NO: 70 - DNA, 20 bp, synthetic construct
  source 1..20: mol_type = other DNA
ccaaatattcctaagctcca

SEQ ID NO: 71 - DNA, 20 bp, synthetic construct
  source 1..20: mol_type = other DNA
cccaaatattcctaagctcc

SEQ ID NO: 72 - DNA, 20 bp, synthetic construct
  source 1..20: mol_type = other DNA
gaagaattgacatcctcaaa

SEQ ID NO: 73 - DNA, 20 bp, synthetic construct
  source 1..20: mol_type = other DNA
cagaagaattgacatcctca

SEQ ID NO: 74 - DNA, 20 bp, synthetic construct
  source 1..20: mol_type = other DNA
gcagaagaattgacatcctc

SEQ ID NO: 75 - DNA, 20 bp, synthetic construct
  source 1..20: mol_type = other DNA
cacagcagaagaattgacat

SEQ ID NO: 76 - DNA, 20 bp, synthetic construct
  source 1..20: mol_type = other DNA
catttgattctgttctggag

SEQ ID NO: 77 - DNA, 20 bp, synthetic construct
  source 1..20: mol_type = other DNA
gcatttgattctgttctgga

SEQ ID NO: 78 - DNA, 20 bp, synthetic construct
  source 1..20: mol_type = other DNA
ggcatttgattctgttctgg

SEQ ID NO: 79 - DNA, 20 bp, synthetic construct
  source 1..20: mol_type = other DNA
gaaggcatttgattctgttc

SEQ ID NO: 80 - DNA, 20 bp, synthetic construct
  source 1..20: mol_type = other DNA
tggaggaaggcatttgattc

SEQ ID NO: 81 - DNA, 20 bp, synthetic construct
  source 1..20: mol_type = other DNA
ttggaggaaggcatttgatt

SEQ ID NO: 82 - DNA, 20 bp, synthetic construct
  source 1..20: mol_type = other DNA
tttggaggaaggcatttgat

SEQ ID NO: 83 - DNA, 20 bp, synthetic construct
  source 1..20: mol_type = other DNA
catctctcaatcatgcctag

SEQ ID NO: 84 - DNA, 16 bp, synthetic construct
  source 1..16: mol_type = other DNA
gccacctagtcatgtt

SEQ ID NO: 85 - DNA, 20 bp, synthetic construct
  source 1..20: mol_type = other DNA
tcacccaaccaccaaagctt

SEQ ID NO: 86 - DNA, 20 bp, synthetic construct
  source 1..20: mol_type = other DNA
gctgctccatcacccaacca

SEQ ID NO: 87 - DNA, 20 bp, synthetic construct
  source 1..20: mol_type = other DNA
cacctctgtgtccctagaat

SEQ ID NO: 88 - DNA, 20 bp, synthetic construct
  source 1..20: mol_type = other DNA
ccacctctgtgtccctagaa

SEQ ID NO: 89 - DNA, 20 bp, synthetic construct
  source 1..20: mol_type = other DNA
ctctaagtcaccaatgatca

SEQ ID NO: 90 - DNA, 20 bp, synthetic construct
  source 1..20: mol_type = other DNA
tctctaagtcaccaatgatc

SEQ ID NO: 91 - DNA, 20 bp, synthetic construct
  source 1..20: mol_type = other DNA
ttctctaagtcaccaatgat

SEQ ID NO: 92 - DNA, 20 bp, synthetic construct
  source 1..20: mol_type = other DNA
cttctctaagtcaccaatga

SEQ ID NO: 93 - DNA, 20 bp, synthetic construct
  source 1..20: mol_type = other DNA
tcttctctaagtcaccaatg

SEQ ID NO: 94 - DNA, 20 bp, synthetic construct
  source 1..20: mol_type = other DNA
ttgactgtgctgggaaggag

SEQ ID NO: 95 - DNA, 20 bp, synthetic construct
  source 1..20: mol_type = other DNA
tttgactgtgctgggaagga

SEQ ID NO: 96 - DNA, 20 bp, synthetic construct
  source 1..20: mol_type = other DNA
gtttgactgtgctgggaagg

SEQ ID NO: 97 - DNA, 20 bp, synthetic construct
  source 1..20: mol_type = other DNA
ggtttgactgtgctgggaag

SEQ ID NO: 98 - DNA, 20 bp, synthetic construct
  source 1..20: mol_type = other DNA
tggtttgactgtgctgggaa

SEQ ID NO: 99 - DNA, 20 bp, synthetic construct
  source 1..20: mol_type = other DNA
tctctggtttgactgtgctg

SEQ ID NO: 100 - DNA, 20 bp, synthetic construct
  source 1..20: mol_type = other DNA
ggttctctctggtttgactg

SEQ ID NO: 101 - DNA, 20 bp, synthetic construct
  source 1..20: mol_type = other DNA
tatgcagctcccagaaagac

SEQ ID NO: 102 - DNA, 20 bp, synthetic construct
  source 1..20: mol_type = other DNA
ttatgcagctcccagaaaga

SEQ ID NO: 103 - DNA, 20 bp, synthetic construct
  source 1..20: mol_type = other DNA
tttatgcagctcccagaaag

SEQ ID NO: 104 - DNA, 20 bp, synthetic construct
  source 1..20: mol_type = other DNA
ctttatgcagctcccagaaa

SEQ ID NO: 105 - DNA, 20 bp, synthetic construct
  source 1..20: mol_type = other DNA
gtttcacccagacacccaaa

SEQ ID NO: 106 - DNA, 16 bp, synthetic construct
  source 1..16: mol_type = other DNA
gcatagagcaatgacc

SEQ ID NO: 107 - DNA, 20 bp, synthetic construct
  source 1..20: mol_type = other DNA
ctaaggcatagagcaatgac

SEQ ID NO: 108 - DNA, 20 bp, synthetic construct
  source 1..20: mol_type = other DNA
cctaaggcatagagcaatga

SEQ ID NO: 109 - DNA, 20 bp, synthetic construct
  source 1..20: mol_type = other DNA
tcctaaggcatagagcaatg

SEQ ID NO: 110 - DNA, 20 bp, synthetic construct
  source 1..20: mol_type = other DNA
ttcctaaggcatagagcaat

SEQ ID NO: 111 - DNA, 16 bp, synthetic construct
  source 1..16: mol_type = other DNA
tcctaaggcatagagc

SEQ ID NO: 112 - DNA, 20 bp, synthetic construct
  source 1..20: mol_type = other DNA
gattctctctggttcctaag

SEQ ID NO: 113 - DNA, 20 bp, synthetic construct
  source 1..20: mol_type = other DNA
cccagaccctttcagagtgt

SEQ ID NO: 114 - DNA, 16 bp, synthetic construct
  source 1..16: mol_type = other DNA
ttagatatagcctgct

SEQ ID NO: 115 - DNA, 20 bp, synthetic construct
  source 1..20: mol_type = other DNA
ttccttagatatagcctgct

SEQ ID NO: 116 - DNA, 16 bp, synthetic construct
  source 1..16: mol_type = other DNA
cttagatatagcctgc

SEQ ID NO: 117 - DNA, 20 bp, synthetic construct
  source 1..20: mol_type = other DNA
cttccttagatatagcctgc

SEQ ID NO: 118 - DNA, 16 bp, synthetic construct
  source 1..16: mol_type = other DNA
ccttagatatagcctg

SEQ ID NO: 119 - DNA, 20 bp, synthetic construct
  source 1..20: mol_type = other DNA
tcttccttagatatagcctg

SEQ ID NO: 120 - DNA, 20 bp, synthetic construct
  source 1..20: mol_type = other DNA
tagagccatcttccttagat

SEQ ID NO: 121 - DNA, 20 bp, synthetic construct
  source 1..20: mol_type = other DNA
gaggcaatggaatcttggat

SEQ ID NO: 122 - DNA, 20 bp, synthetic construct
  source 1..20: mol_type = other DNA
ctctctggaaactctatatt

SEQ ID NO: 123 - DNA, 20 bp, synthetic construct
  source 1..20: mol_type = other DNA
cctctctggaaactctatat

SEQ ID NO: 124 - DNA, 16 bp, synthetic construct
  source 1..16: mol_type = other DNA
taattgatgaaggtcc

SEQ ID NO: 125 - DNA, 20 bp, synthetic construct
  source 1..20: mol_type = other DNA
tgccatctcagcacctcagc

SEQ ID NO: 126 - DNA, 20 bp, synthetic construct
  source 1..20: mol_type = other DNA
ctgccatctcagcacctcag

SEQ ID NO: 127 - DNA, 20 bp, synthetic construct
  source 1..20: mol_type = other DNA
ttcaagaactgccatctcag

SEQ ID NO: 128 - DNA, 20 bp, synthetic construct
  source 1..20: mol_type = other DNA
gaccaccactctaaatgtct

SEQ ID NO: 129 - DNA, 20 bp, synthetic construct
  source 1..20: mol_type = other DNA
tagaccaccactctaaatgt

SEQ ID NO: 130 - DNA, 20 bp, synthetic construct
  source 1..20: mol_type = other DNA
ctagaccaccactctaaatg

SEQ ID NO: 131 - DNA, 20 bp, synthetic construct
  source 1..20: mol_type = other DNA
cctagaccaccactctaaat

SEQ ID NO: 132 - DNA, 20 bp, synthetic construct
  source 1..20: mol_type = other DNA
ccctagaccaccactctaaa

SEQ ID NO: 133 - DNA, 20 bp, synthetic construct
  source 1..20: mol_type = other DNA
gccctagaccaccactctaa

SEQ ID NO: 134 - DNA, 16 bp, synthetic construct
  source 1..16: mol_type = other DNA
ctagaccaccactcta

SEQ ID NO: 135 - DNA, 20 bp, synthetic construct
  source 1..20: mol_type = other DNA
tgccctagaccaccactcta

SEQ ID NO: 136 - DNA, 20 bp, synthetic construct
  source 1..20: mol_type = other DNA
ctcatactaccaagccctgc

SEQ ID NO: 137 - DNA, 20 bp, synthetic construct
  source 1..20: mol_type = other DNA
cctcatactaccaagccctg

SEQ ID NO: 138 - DNA, 20 bp, synthetic construct
  source 1..20: mol_type = other DNA
gtcactaaccctcatactac

SEQ ID NO: 139 - DNA, 20 bp, synthetic construct
  source 1..20: mol_type = other DNA
ggtcactaaccctcatacta

SEQ ID NO: 140 - DNA, 16 bp, synthetic construct
  source 1..16: mol_type = other DNA
ggtcactaaccctcat

SEQ ID NO: 141 - DNA, 16 bp, synthetic construct
  source 1..16: mol_type = other DNA
catgatgtagcaaccc

SEQ ID NO: 142 - DNA, 16 bp, synthetic construct
  source 1..16: mol_type = other DNA
ccatgatgtagcaacc

SEQ ID NO: 143 - DNA, 16 bp, synthetic construct
  source 1..16: mol_type = other DNA
cccatgatgtagcaac

SEQ ID NO: 144 - DNA, 20 bp, synthetic construct
  source 1..20: mol_type = other DNA
gcctggaactggacattggg

SEQ ID NO: 145 - DNA, 20 bp, synthetic construct
  source 1..20: mol_type = other DNA
gcttggaaactgtctgcctc

SEQ ID NO: 146 - DNA, 20 bp, synthetic construct
  source 1..20: mol_type = other DNA
tgcttggaaactgtctgcct

SEQ ID NO: 147 - DNA, 20 bp, synthetic construct
  source 1..20: mol_type = other DNA
gatgcttggaaactgtctgc

SEQ ID NO: 148 - DNA, 20 bp, synthetic construct
  source 1..20: mol_type = other DNA
ggatgcttggaaactgtctg

SEQ ID NO: 149 - DNA, 20 bp, synthetic construct
  source 1..20: mol_type = other DNA
taaagacacatcttcagcct

SEQ ID NO: 150 - DNA, 20 bp, synthetic construct
  source 1..20: mol_type = other DNA
ttaaagacacatcttcagcc

SEQ ID NO: 151 - DNA, 20 bp, synthetic construct
  source 1..20: mol_type = other DNA
gcagaaattaaagacacatc

SEQ ID NO: 152 - DNA, 20 bp, synthetic construct
  source 1..20: mol_type = other DNA
tttcctaaagatgaggtggc

SEQ ID NO: 153 - DNA, 20 bp, synthetic construct
  source 1..20: mol_type = other DNA
gtttcctaaagatgaggtgg

SEQ ID NO: 154 - DNA, 20 bp, synthetic construct
  source 1..20: mol_type = other DNA
gagtttcctaaagatgaggt

SEQ ID NO: 155 - DNA, 20 bp, synthetic construct
  source 1..20: mol_type = other DNA
cagagtttcctaaagatgag

SEQ ID NO: 156 - DNA, 20 bp, synthetic construct
  source 1..20: mol_type = other DNA
tcagagtttcctaaagatga

SEQ ID NO: 157 - DNA, 20 bp, synthetic construct
  source 1..20: mol_type = other DNA
ttcagagtttcctaaagatg

SEQ ID NO: 158 - DNA, 20 bp, synthetic construct
  source 1..20: mol_type = other DNA
cttcagagtttcctaaagat

SEQ ID NO: 159 - DNA, 20 bp, synthetic construct
  source 1..20: mol_type = other DNA
gcttcagagtttcctaaaga

SEQ ID NO: 160 - DNA, 20 bp, synthetic construct
  source 1..20: mol_type = other DNA
ttccacaagaagccagagct

SEQ ID NO: 161 - DNA, 20 bp, synthetic construct
  source 1..20: mol_type = other DNA
cattccacaagaagccagag

SEQ ID NO: 162 - DNA, 20 bp, synthetic construct
  source 1..20: mol_type = other DNA
tacattccacaagaagccag

SEQ ID NO: 163 - DNA, 20 bp, synthetic construct
  source 1..20: mol_type = other DNA
ttacattccacaagaagcca

SEQ ID NO: 164 - DNA, 20 bp, synthetic construct
  source 1..20: mol_type = other DNA
cttacattccacaagaagcc

SEQ ID NO: 165 - DNA, 20 bp, synthetic construct
  source 1..20: mol_type = other DNA
tcttacattccacaagaagc

SEQ ID NO: 166 - DNA, 20 bp, synthetic construct
  source 1..20: mol_type = other DNA
gtcttacattccacaagaag

SEQ ID NO: 167 - DNA, 20 bp, synthetic construct
  source 1..20: mol_type = other DNA
caaagtcttacattccacaa

SEQ ID NO: 168 - DNA, 20 bp, synthetic construct
  source 1..20: mol_type = other DNA
gacaaagtcttacattccac

SEQ ID NO: 169 - DNA, 20 bp, synthetic construct
  source 1..20: mol_type = other DNA
gctgatgactttaccatttc

SEQ ID NO: 170 - DNA, 20 bp, synthetic construct
  source 1..20: mol_type = other DNA
tgctgatgactttaccattt

SEQ ID NO: 171 - DNA, 20 bp, synthetic construct
  source 1..20: mol_type = other DNA
ctgctgatgactttaccatt

SEQ ID NO: 172 - DNA, 20 bp, synthetic construct
  source 1..20: mol_type = other DNA
taactgctgatgactttacc

SEQ ID NO: 173 - DNA, 20 bp, synthetic construct
  source 1..20: mol_type = other DNA
ctaactgctgatgactttac

SEQ ID NO: 174 - DNA, 20 bp, synthetic construct
  source 1..20: mol_type = other DNA
cctaactgctgatgacttta

SEQ ID NO: 175 - DNA, 20 bp, synthetic construct
  source 1..20: mol_type = other DNA
ccctaactgctgatgacttt

SEQ ID NO: 176 - DNA, 20 bp, synthetic construct
  source 1..20: mol_type = other DNA
tccctaactgctgatgactt

SEQ ID NO: 177 - DNA, 20 bp, synthetic construct
  source 1..20: mol_type = other DNA
ttccctaactgctgatgact

SEQ ID NO: 178 - DNA, 20 bp, synthetic construct
  source 1..20: mol_type = other DNA
tttccctaactgctgatgac

SEQ ID NO: 179 - DNA, 20 bp, synthetic construct
  source 1..20: mol_type = other DNA
gagcaacagaacctcaactg

SEQ ID NO: 180 - DNA, 20 bp, synthetic construct
  source 1..20: mol_type = other DNA
tctggagaattggagttggg

SEQ ID NO: 181 - DNA, 16 bp, synthetic construct
  source 1..16: mol_type = other DNA
tatcatcagtctaggg

SEQ ID NO: 182 - DNA, 20 bp, synthetic construct
  source 1..20: mol_type = other DNA
tctttatcatcagtctaggg

SEQ ID NO: 183 - DNA, 20 bp, synthetic construct
  source 1..20: mol_type = other DNA
ctctttatcatcagtctagg

SEQ ID NO: 184 - DNA, 20 bp, synthetic construct
  source 1..20: mol_type = other DNA
tgctccaggctccctcaaca

SEQ ID NO: 185 - DNA, 20 bp, synthetic construct
  source 1..20: mol_type = other DNA
caaacactcagcatggacaa

SEQ ID NO: 186 - DNA, 20 bp, synthetic construct
  source 1..20: mol_type = other DNA
tcaaacactcagcatggaca

SEQ ID NO: 187 - DNA, 20 bp, synthetic construct
  source 1..20: mol_type = other DNA
ttcaaacactcagcatggac

SEQ ID NO: 188 - DNA, 20 bp, synthetic construct
  source 1..20: mol_type = other DNA
cttcaaacactcagcatgga

SEQ ID NO: 189 - DNA, 20 bp, synthetic construct
  source 1..20: mol_type = other DNA
gcttcaaacactcagcatgg

SEQ ID NO: 190 - DNA, 20 bp, synthetic construct
  source 1..20: mol_type = other DNA
ggcttcaaacactcagcatg

SEQ ID NO: 191 - DNA, 20 bp, synthetic construct
  source 1..20: mol_type = other DNA
caggcttcaaacactcagca

SEQ ID NO: 192 - DNA, 20 bp, synthetic construct
  source 1..20: mol_type = other DNA
cacaggcttcaaacactcag

SEQ ID NO: 193 - DNA, 20 bp, synthetic construct
  source 1..20: mol_type = other DNA
tcacaggcttcaaacactca

SEQ ID NO: 194 - DNA, 20 bp, synthetic construct
  source 1..20: mol_type = other DNA
ctcacaggcttcaaacactc

SEQ ID NO: 195 - DNA, 20 bp, synthetic construct
  source 1..20: mol_type = other DNA
tctcacaggcttcaaacact

SEQ ID NO: 196 - DNA, 20 bp, synthetic construct
  source 1..20: mol_type = other DNA
gaactcctgacccaagtgcc

SEQ ID NO: 197 - DNA, 20 bp, synthetic construct
  source 1..20: mol_type = other DNA
tgaactcctgacccaagtgc

SEQ ID NO: 198 - DNA, 20 bp, synthetic construct
  source 1..20: mol_type = other DNA
ctgaactcctgacccaagtg

SEQ ID NO: 199 - DNA, 20 bp, synthetic construct
  source 1..20: mol_type = other DNA
tctgaactcctgacccaagt

SEQ ID NO: 200 - DNA, 20 bp, synthetic construct
  source 1..20: mol_type = other DNA
ctctgaactcctgacccaag

SEQ ID NO: 201 - DNA, 20 bp, synthetic construct
  source 1..20: mol_type = other DNA
cctctgaactcctgacccaa

SEQ ID NO: 202 - DNA, 20 bp, synthetic construct
  source 1..20: mol_type = other DNA
ttcagttaccatcatcctgg

SEQ ID NO: 203 - DNA, 20 bp, synthetic construct
  source 1..20: mol_type = other DNA
cagcttcagttaccatcatc

SEQ ID NO: 204 - DNA, 20 bp, synthetic construct
  source 1..20: mol_type = other DNA
ccagcttcagttaccatcat

SEQ ID NO: 205 - DNA, 20 bp, synthetic construct
  source 1..20: mol_type = other DNA
cccagcttcagttaccatca

SEQ ID NO: 206 - DNA, 20 bp, synthetic construct
  source 1..20: mol_type = other DNA
tgagacaacaccatccacaa

SEQ ID NO: 207 - DNA, 20 bp, synthetic construct
  source 1..20: mol_type = other DNA
ctgagacaacaccatccaca

SEQ ID NO: 208 - DNA, 20 bp, synthetic construct
  source 1..20: mol_type = other DNA
tctgagacaacaccatccac

SEQ ID NO: 209 - DNA, 20 bp, synthetic construct
  source 1..20: mol_type = other DNA
gcagcatataactctccttc

SEQ ID NO: 210 - DNA, 20 bp, synthetic construct
  source 1..20: mol_type = other DNA
ccattctgctaagtccaggg

SEQ ID NO: 211 - DNA, 20 bp, synthetic construct
  source 1..20: mol_type = other DNA
caccattctgctaagtccag

SEQ ID NO: 212 - DNA, 20 bp, synthetic construct
  source 1..20: mol_type = other DNA
ccaccattctgctaagtcca

SEQ ID NO: 213 - DNA, 20 bp, synthetic construct
  source 1..20: mol_type = other DNA
caccaccattctgctaagtc

SEQ ID NO: 214 - DNA, 20 bp, synthetic construct
  source 1..20: mol_type = other DNA
tcaccaccattctgctaagt

SEQ ID NO: 215 - DNA, 20 bp, synthetic construct
  source 1..20: mol_type = other DNA
gtcaccaccattctgctaag

SEQ ID NO: 216 - DNA, 20 bp, synthetic construct
  source 1..20: mol_type = other DNA
cagtcaccaccattctgcta

SEQ ID NO: 217 - DNA, 20 bp, synthetic construct
  source 1..20: mol_type = other DNA
gatcagtcaccaccattctg

SEQ ID NO: 218 - DNA, 20 bp, synthetic construct
  source 1..20: mol_type = other DNA
ggatcagtcaccaccattct

SEQ ID NO: 219 - DNA, 20 bp, synthetic construct
  source 1..20: mol_type = other DNA
catctctccaccacagcagc

SEQ ID NO: 220 - DNA, 20 bp, synthetic construct
  source 1..20: mol_type = other DNA
ccatctctccaccacagcag

SEQ ID NO: 221 - DNA, 20 bp, synthetic construct
  source 1..20: mol_type = other DNA
ggctatggacatttgagggc

SEQ ID NO: 222 - DNA, 20 bp, synthetic construct
  source 1..20: mol_type = other DNA
tcatcttcaagagcctggaa

SEQ ID NO: 223 - DNA, 20 bp, synthetic construct
  source 1..20: mol_type = other DNA
ttcatcttcaagagcctgga

SEQ ID NO: 224 - DNA, 20 bp, synthetic construct
  source 1..20: mol_type = other DNA
ctaccagagagcagcagtga

SEQ ID NO: 225 - DNA, 20 bp, synthetic construct
  source 1..20: mol_type = other DNA
cactgcctccagacatcagg

SEQ ID NO: 226 - DNA, 20 bp, synthetic construct
  source 1..20: mol_type = other DNA
tacactgcctccagacatca

SEQ ID NO: 227 - DNA, 20 bp, synthetic construct
  source 1..20: mol_type = other DNA
ctacactgcctccagacatc

SEQ ID NO: 228 - DNA, 20 bp, synthetic construct
  source 1..20: mol_type = other DNA
gaactacactgcctccagac

SEQ ID NO: 229 - DNA, 20 bp, synthetic construct
  source 1..20: mol_type = other DNA
gaagaactacactgcctcca

SEQ ID NO: 230 - DNA, 20 bp, synthetic construct
  source 1..20: mol_type = other DNA
taagaagaactacactgcct

SEQ ID NO: 231 - DNA, 20 bp, synthetic construct
  source 1..20: mol_type = other DNA
ttaagaagaactacactgcc

SEQ ID NO: 232 - DNA, 20 bp, synthetic construct
  source 1..20: mol_type = other DNA
tttaagaagaactacactgc

SEQ ID NO: 233 - DNA, 20 bp, synthetic construct
  source 1..20: mol_type = other DNA
ccagaaaggtgtaaatattc

SEQ ID NO: 234 - DNA, 20 bp, synthetic construct
  source 1..20: mol_type = other DNA
cccagaaaggtgtaaatatt

SEQ ID NO: 235 - DNA, 20 bp, synthetic construct
  source 1..20: mol_type = other DNA
gcatttatctcccaaacaca

SEQ ID NO: 236 - DNA, 20 bp, synthetic construct
  source 1..20: mol_type = other DNA
ggcatttatctcccaaacac

SEQ ID NO: 237 - DNA, 20 bp, synthetic construct
  source 1..20: mol_type = other DNA
tggcatttatctcccaaaca

SEQ ID NO: 238 - DNA, 20 bp, synthetic construct
  source 1..20: mol_type = other DNA
ggtcatgttatccatacagg

SEQ ID NO: 239 - DNA, 20 bp, synthetic construct
  source 1..20: mol_type = other DNA
caaggtcatgttatccatac

SEQ ID NO: 240 - DNA, 20 bp, synthetic construct
  source 1..20: mol_type = other DNA
gcaaggtcatgttatccata

SEQ ID NO: 241 - DNA, 20 bp, synthetic construct
  source 1..20: mol_type = other DNA
caaatgaatgtagctcctta

SEQ ID NO: 242 - DNA, 20 bp, synthetic construct
  source 1..20: mol_type = other DNA
gcaaatgaatgtagctcctt

SEQ ID NO: 243 - DNA, 20 bp, synthetic construct
  source 1..20: mol_type = other DNA
cagcaaatgaatgtagctcc

SEQ ID NO: 244 - DNA, 20 bp, synthetic construct
  source 1..20: mol_type = other DNA
tcagcaaatgaatgtagctc

SEQ ID NO: 245 - DNA, 20 bp, synthetic construct
  source 1..20: mol_type = other DNA
tatcagcaaatgaatgtagc

SEQ ID NO: 246 - DNA, 16 bp, synthetic construct
  source 1..16: mol_type = other DNA
gactattgttgcatga

SEQ ID NO: 247 - DNA, 20 bp, synthetic construct
  source 1..20: mol_type = other DNA
ttgaatgcccagtacccagc

SEQ ID NO: 248 - DNA, 20 bp, synthetic construct
  source 1..20: mol_type = other DNA
cattgaatgcccagtaccca

SEQ ID NO: 249 - DNA, 20 bp, synthetic construct
  source 1..20: mol_type = other DNA
catcaggcagacacagggtc

SEQ ID NO: 250 - DNA, 20 bp, synthetic construct
  source 1..20: mol_type = other DNA
ccatcaggcagacacagggt

SEQ ID NO: 251 - DNA, 20 bp, synthetic construct
  source 1..20: mol_type = other DNA
tccatcaggcagacacaggg

SEQ ID NO: 252 - DNA, 20 bp, synthetic construct
  source 1..20: mol_type = other DNA
tctttaccagacacaaactc

SEQ ID NO: 253 - DNA, 20 bp, synthetic construct
  source 1..20: mol_type = other DNA
gctgtctgtgtctttaccag

SEQ ID NO: 254 - DNA, 20 bp, synthetic construct
  source 1..20: mol_type = other DNA
gatttcattgctgtctgtgt

SEQ ID NO: 255 - DNA, 20 bp, synthetic construct
  source 1..20: mol_type = other DNA
tgatttcattgctgtctgtg

SEQ ID NO: 256 - DNA, 20 bp, synthetic construct
  source 1..20: mol_type = other DNA
cttcttagtaaccttaatgg

SEQ ID NO: 257 - DNA, 20 bp, synthetic construct
  source 1..20: mol_type = other DNA
cattcaaagctctgcattct

SEQ ID NO: 258 - DNA, 20 bp, synthetic construct
  source 1..20: mol_type = other DNA
ccattcaaagctctgcattc

SEQ ID NO: 259 - DNA, 20 bp, synthetic construct
  source 1..20: mol_type = other DNA
cccattcaaagctctgcatt

SEQ ID NO: 260 - DNA, 20 bp, synthetic construct
  source 1..20: mol_type = other DNA
gcccattcaaagctctgcat

SEQ ID NO: 261 - DNA, 20 bp, synthetic construct
  source 1..20: mol_type = other DNA
tgcccattcaaagctctgca

SEQ ID NO: 262 - DNA, 20 bp, synthetic construct
  source 1..20: mol_type = other DNA
ctgcccattcaaagctctgc

SEQ ID NO: 263 - DNA, 20 bp, synthetic construct
  source 1..20: mol_type = other DNA
tctgcccattcaaagctctg

SEQ ID NO: 264 - DNA, 20 bp, synthetic construct
  source 1..20: mol_type = other DNA
gtctgcccattcaaagctct

SEQ ID NO: 265 - DNA, 20 bp, synthetic construct
  source 1..20: mol_type = other DNA
tgtctgcccattcaaagctc

SEQ ID NO: 266 - DNA, 20 bp, synthetic construct
  source 1..20: mol_type = other DNA
catgtctgcccattcaaagc

SEQ ID NO: 267 - DNA, 20 bp, synthetic construct
  source 1..20: mol_type = other DNA
ccatgtctgcccattcaaag

SEQ ID NO: 268 - DNA, 20 bp, synthetic construct
  source 1..20: mol_type = other DNA
gccatgtctgcccattcaaa

SEQ ID NO: 269 - DNA, 20 bp, synthetic construct
  source 1..20: mol_type = other DNA
tgccatgtctgcccattcaa

SEQ ID NO: 270 - DNA, 20 bp, synthetic construct
  source 1..20: mol_type = other DNA
ggcaaactacacctgtgatg

SEQ ID NO: 271 - DNA, 20 bp, synthetic construct
  source 1..20: mol_type = other DNA
gaggcaaactacacctgtga

SEQ ID NO: 272 - DNA, 16 bp, synthetic construct
  source 1..16: mol_type = other DNA
ggcaaactacacctgt

SEQ ID NO: 273 - DNA, 16 bp, synthetic construct
  source 1..16: mol_type = other DNA
ggaggcaaactacacc

SEQ ID NO: 274 - DNA, 20 bp, synthetic construct
  source 1..20: mol_type = other DNA
cagacctgattgtgaccctc

SEQ ID NO: 275 - DNA, 20 bp, synthetic construct
  source 1..20: mol_type = other DNA
gcagacctgattgtgaccct

SEQ ID NO: 276 - DNA, 16 bp, synthetic construct
  source 1..16: mol_type = other DNA
gacctgattgtgaccc

SEQ ID NO: 277 - DNA, 20 bp, synthetic construct
  source 1..20: mol_type = other DNA
tgcagacctgattgtgaccc

SEQ ID NO: 278 - DNA, 20 bp, synthetic construct
  source 1..20: mol_type = other DNA
caaatgcagacctgattgtg

SEQ ID NO: 279 - DNA, 20 bp, synthetic construct
  source 1..20: mol_type = other DNA
tacaaatgcagacctgattg

SEQ ID NO: 280 - DNA, 20 bp, synthetic construct
  source 1..20: mol_type = other DNA
ttacaaatgcagacctgatt

SEQ ID NO: 281 - DNA, 20 bp, synthetic construct
  source 1..20: mol_type = other DNA
tttacaaatgcagacctgat

SEQ ID NO: 282 - DNA, 20 bp, synthetic construct
  source 1..20: mol_type = other DNA
caagtatagcagcctctcag

SEQ ID NO: 283 - DNA, 16 bp, synthetic construct
  source 1..16: mol_type = other DNA
gtatagcagcctctca

SEQ ID NO: 284 - DNA, 20 bp, synthetic construct
  source 1..20: mol_type = other DNA
gcaagtatagcagcctctca

SEQ ID NO: 285 - DNA, 16 bp, synthetic construct
  source 1..16: mol_type = other DNA
caagtatagcagcctc

SEQ ID NO: 286 - DNA, 20 bp, synthetic construct
  source 1..20: mol_type = other DNA
caaactcagcatattgtccc

SEQ ID NO: 287 - DNA, 20 bp, synthetic construct
  source 1..20: mol_type = other DNA
ccaaactcagcatattgtcc

SEQ ID NO: 288 - DNA, 20 bp, synthetic construct
  source 1..20: mol_type = other DNA
caccaaactcagcatattgt

SEQ ID NO: 289 - DNA, 20 bp, synthetic construct
  source 1..20: mol_type = other DNA
gcaccaaactcagcatattg

SEQ ID NO: 290 - DNA, 20 bp, synthetic construct
  source 1..20: mol_type = other DNA
ggcaccaaactcagcatatt

SEQ ID NO: 291 - DNA, 20 bp, synthetic construct
  source 1..20: mol_type = other DNA
caggcaccaaactcagcata

SEQ ID NO: 292 - DNA, 20 bp, synthetic construct
  source 1..20: mol_type = other DNA
caacaggcaccaaactcagc

SEQ ID NO: 293 - DNA, 20 bp, synthetic construct
  source 1..20: mol_type = other DNA
gcaacaggcaccaaactcag

SEQ ID NO: 294 - DNA, 20 bp, synthetic construct
  source 1..20: mol_type = other DNA
ggcaacaggcaccaaactca

SEQ ID NO: 295 - DNA, 16 bp, synthetic construct
  source 1..16: mol_type = other DNA
gatcaactacagggcc

SEQ ID NO: 296 - DNA, 20 bp, synthetic construct
  source 1..20: mol_type = other DNA
tgagcaagacatagaccagc

SEQ ID NO: 297 - DNA, 20 bp, synthetic construct
  source 1..20: mol_type = other DNA
ctgagcaagacatagaccag

SEQ ID NO: 298 - DNA, 20 bp, synthetic construct
  source 1..20: mol_type = other DNA
tactgagcaagacatagacc

SEQ ID NO: 299 - DNA, 20 bp, synthetic construct
  source 1..20: mol_type = other DNA
ttactgagcaagacatagac

SEQ ID NO: 300 - DNA, 20 bp, synthetic construct
  source 1..20: mol_type = other DNA
tttactgagcaagacataga

SEQ ID NO: 301 - DNA, 20 bp, synthetic construct
  source 1..20: mol_type = other DNA
catttactgagcaagacata

SEQ ID NO: 302 - DNA, 20 bp, synthetic construct
  source 1..20: mol_type = other DNA
ccatttactgagcaagacat

SEQ ID NO: 303 - DNA, 20 bp, synthetic construct
  source 1..20: mol_type = other DNA
tccatttactgagcaagaca

SEQ ID NO: 304 - DNA, 20 bp, synthetic construct
  source 1..20: mol_type = other DNA
ttccatttactgagcaagac

SEQ ID NO: 305 - DNA, 20 bp, synthetic construct
  source 1..20: mol_type = other DNA
cttccatttactgagcaaga

SEQ ID NO: 306 - DNA, 20 bp, synthetic construct
  source 1..20: mol_type = other DNA
catcatcctttgtgtccaga

SEQ ID NO: 307 - DNA, 20 bp, synthetic construct
  source 1..20: mol_type = other DNA
catttgaaccctgtcaccca

SEQ ID NO: 308 - DNA, 20 bp, synthetic construct
  source 1..20: mol_type = other DNA
gcatttgaaccctgtcaccc

SEQ ID NO: 309 - DNA, 20 bp, synthetic construct
  source 1..20: mol_type = other DNA
tgcatttgaaccctgtcacc

SEQ ID NO: 310 - DNA, 20 bp, synthetic construct
  source 1..20: mol_type = other DNA
ctgcatttgaaccctgtcac

SEQ ID NO: 311 - DNA, 20 bp, synthetic construct
  source 1..20: mol_type = other DNA
cactgcatttgaaccctgtc

SEQ ID NO: 312 - DNA, 20 bp, synthetic construct
  source 1..20: mol_type = other DNA
taaacactgcatttgaaccc

SEQ ID NO: 313 - DNA, 20 bp, synthetic construct
  source 1..20: mol_type = other DNA
ttaaacactgcatttgaacc

SEQ ID NO: 314 - DNA, 20 bp, synthetic construct
  source 1..20: mol_type = other DNA
cttaaacactgcatttgaac

SEQ ID NO: 315 - DNA, 20 bp, synthetic construct
  source 1..20: mol_type = other DNA
cacttaaacactgcatttga

SEQ ID NO: 316 - DNA, 20 bp, synthetic construct
  source 1..20: mol_type = other DNA
ccacttaaacactgcatttg

SEQ ID NO: 317 - DNA, 20 bp, synthetic construct
  source 1..20: mol_type = other DNA
cccacttaaacactgcattt

SEQ ID NO: 318 - DNA, 20 bp, synthetic construct
  source 1..20: mol_type = other DNA
tcccacttaaacactgcatt

SEQ ID NO: 319 - DNA, 20 bp, synthetic construct
  source 1..20: mol_type = other DNA
ctcccacttaaacactgcat

SEQ ID NO: 320 - DNA, 20 bp, synthetic construct
  source 1..20: mol_type = other DNA
cctcccacttaaacactgca

SEQ ID NO: 321 - DNA, 20 bp, synthetic construct
  source 1..20: mol_type = other DNA
caatctatgtcaagcttccc

SEQ ID NO: 322 - DNA, 20 bp, synthetic construct
  source 1..20: mol_type = other DNA
tcaatctatgtcaagcttcc

SEQ ID NO: 323 - DNA, 20 bp, synthetic construct
  source 1..20: mol_type = other DNA
ctcaatctatgtcaagcttc

SEQ ID NO: 324 - DNA, 20 bp, synthetic construct
  source 1..20: mol_type = other DNA
cactcaatctatgtcaagct

SEQ ID NO: 325 - DNA, 20 bp, synthetic construct
  source 1..20: mol_type = other DNA
tcactcaatctatgtcaagc

SEQ ID NO: 326 - DNA, 20 bp, synthetic construct
  source 1..20: mol_type = other DNA
ctcactcaatctatgtcaag

SEQ ID NO: 327 - DNA, 20 bp, synthetic construct
  source 1..20: mol_type = other DNA
tctcactcaatctatgtcaa

SEQ ID NO: 328 - DNA, 20 bp, synthetic construct
  source 1..20: mol_type = other DNA
gccaccactgagtataactc

SEQ ID NO: 329 - DNA, 20 bp, synthetic construct
  source 1..20: mol_type = other DNA
cagtcaccaactctctatgg

SEQ ID NO: 330 - DNA, 20 bp, synthetic construct
  source 1..20: mol_type = other DNA
gcagtcaccaactctctatg

SEQ ID NO: 331 - DNA, 20 bp, synthetic construct
  source 1..20: mol_type = other DNA
caaaggcagtcaccaactct

SEQ ID NO: 332 - DNA, 20 bp, synthetic construct
  source 1..20: mol_type = other DNA
tcaaaggcagtcaccaactc

SEQ ID NO: 333 - DNA, 20 bp, synthetic construct
  source 1..20: mol_type = other DNA
ctcaaaggcagtcaccaact

SEQ ID NO: 334 - DNA, 20 bp, synthetic construct
  source 1..20: mol_type = other DNA
tctcaaaggcagtcaccaac

SEQ ID NO: 335 - DNA, 20 bp, synthetic construct
  source 1..20: mol_type = other DNA
cattctcctctcaaaggcag

SEQ ID NO: 336 - DNA, 20 bp, synthetic construct
  source 1..20: mol_type = other DNA
ccattctcctctcaaaggca

SEQ ID NO: 337 - DNA, 20 bp, synthetic construct
  source 1..20: mol_type = other DNA
ggatcacaaccattctcctc

SEQ ID NO: 338 - DNA, 20 bp, synthetic construct
  source 1..20: mol_type = other DNA
ggtataagtcctctgggtga

SEQ ID NO: 339 - DNA, 16 bp, synthetic construct
  source 1..16: mol_type = other DNA
tataagtcctctgggt

SEQ ID NO: 340 - DNA, 16 bp, synthetic construct
  source 1..16: mol_type = other DNA
gtataagtcctctggg

SEQ ID NO: 341 - DNA, 16 bp, synthetic construct
  source 1..16: mol_type = other DNA
ggtataagtcctctgg

SEQ ID NO: 342 - DNA, 20 bp, synthetic construct
  source 1..20: mol_type = other DNA
tccttctgctgtcaccaagg

SEQ ID NO: 343 - DNA, 20 bp, synthetic construct
  source 1..20: mol_type = other DNA
gtccttctgctgtcaccaag

SEQ ID NO: 344 - DNA, 20 bp, synthetic construct
  source 1..20: mol_type = other DNA
gagtccttctgctgtcacca

SEQ ID NO: 345 - DNA, 20 bp, synthetic construct
  source 1..20: mol_type = other DNA
tatccatgaattcctcccaa

SEQ ID NO: 346 - DNA, 20 bp, synthetic construct
  source 1..20: mol_type = other DNA
catctccatatccatgaatt

SEQ ID NO: 347 - DNA, 20 bp, synthetic construct
  source 1..20: mol_type = other DNA
tcatctccatatccatgaat

SEQ ID NO: 348 - DNA, 20 bp, synthetic construct
  source 1..20: mol_type = other DNA
ttcatctccatatccatgaa

SEQ ID NO: 349 - DNA, 20 bp, synthetic construct
  source 1..20: mol_type = other DNA
gttcatctccatatccatga

SEQ ID NO: 350 - DNA, 16 bp, synthetic construct
  source 1..16: mol_type = other DNA
gtgttatctggtctac

SEQ ID NO: 351 - DNA, 20 bp, synthetic construct
  source 1..20: mol_type = other DNA
gatatttccacctagagact

SEQ ID NO: 352 - DNA, 20 bp, synthetic construct
  source 1..20: mol_type = other DNA
tgatatttccacctagagac

SEQ ID NO: 353 - DNA, 20 bp, synthetic construct
  source 1..20: mol_type = other DNA
gtgatatttccacctagaga

SEQ ID NO: 354 - DNA, 20 bp, synthetic construct
  source 1..20: mol_type = other DNA
tgtgatatttccacctagag

SEQ ID NO: 355 - DNA, 20 bp, synthetic construct
  source 1..20: mol_type = other DNA
ctgtgatatttccacctaga

SEQ ID NO: 356 - DNA, 20 bp, synthetic construct
  source 1..20: mol_type = other DNA
tctgtgatatttccacctag

SEQ ID NO: 357 - DNA, 20 bp, synthetic construct
  source 1..20: mol_type = other DNA
tagcagaatgtctcttattc

SEQ ID NO: 358 - DNA, 20 bp, synthetic construct
  source 1..20: mol_type = other DNA
ctagcagaatgtctcttatt

SEQ ID NO: 359 - DNA, 20 bp, synthetic construct
  source 1..20: mol_type = other DNA
tctagcagaatgtctcttat

SEQ ID NO: 360 - DNA, 20 bp, synthetic construct
  source 1..20: mol_type = other DNA
tgatccctcaatcctagctg

SEQ ID NO: 361 - DNA, 16 bp, synthetic construct
  source 1..16: mol_type = other DNA
gatccctcaatcctag

SEQ ID NO: 362 - DNA, 16 bp, synthetic construct
  source 1..16: mol_type = other DNA
tcatagggttcttacc

SEQ ID NO: 363 - DNA, 16 bp, synthetic construct
  source 1..16: mol_type = other DNA
gtcatagggttcttac

SEQ ID NO: 364 - DNA, 20 bp, synthetic construct
  source 1..20: mol_type = other DNA
gaagtgtcatagggttctta

SEQ ID NO: 365 - DNA, 16 bp, synthetic construct
  source 1..16: mol_type = other DNA
gtgtcatagggttctt

SEQ ID NO: 366 - DNA, 20 bp, synthetic construct
  source 1..20: mol_type = other DNA
tgaagtgtcatagggttctt

SEQ ID NO: 367 - DNA, 20 bp, synthetic construct
  source 1..20: mol_type = other DNA
ttgaagtgtcatagggttct

SEQ ID NO: 368 - DNA, 20 bp, synthetic construct
  source 1..20: mol_type = other DNA
cttgaagtgtcatagggttc

SEQ ID NO: 369 - DNA, 16 bp, synthetic construct
  source 1..16: mol_type = other DNA
gaagtgtcatagggtt

SEQ ID NO: 370 - DNA, 20 bp, synthetic construct
  source 1..20: mol_type = other DNA
tcttgaagtgtcatagggtt

SEQ ID NO: 371 - DNA, 16 bp, synthetic construct
  source 1..16: mol_type = other DNA
ttgaagtgtcataggg

SEQ ID NO: 372 - DNA, 16 bp, synthetic construct
  source 1..16: mol_type = other DNA
cttgaagtgtcatagg

SEQ ID NO: 373 - DNA, 16 bp, synthetic construct
  source 1..16: mol_type = other DNA
gggattatgtgggatc

SEQ ID NO: 374 - DNA, 20 bp, synthetic construct
  source 1..20: mol_type = other DNA
caactgggattatgtgggat

SEQ ID NO: 375 - DNA, 20 bp, synthetic construct
  source 1..20: mol_type = other DNA
caggtttgaggaggtttgag

SEQ ID NO: 376 - DNA, 20 bp, synthetic construct
  source 1..20: mol_type = other DNA
caacccacttcattgtcatg

SEQ ID NO: 377 - DNA, 20 bp, synthetic construct
  source 1..20: mol_type = other DNA
ctacaatgacctcagagccc

SEQ ID NO: 378 - DNA, 20 bp, synthetic construct
  source 1..20: mol_type = other DNA
  modified_base 1..5: mod_base = OTHER; note = 2'-O-methoxyethyl ribonucleotide
  modified_base 16..20: mod_base = OTHER; note = 2'-O-methoxyethyl ribonucleotide
  modified_base 1..20: mod_base = OTHER; note = phosphorothioate linkage
  misc_feature 1..5: note = RNA
  misc_feature 6..15: note = DNA
  misc_feature 16..20: note = RNA
gctacaatgacctcagagcc

SEQ ID NO: 379 - DNA, 20 bp, synthetic construct
  source 1..20: mol_type = other DNA
ggctacaatgacctcagagc

SEQ ID NO: 380 - DNA, 20 bp, synthetic construct
  source 1..20: mol_type = other DNA
tggctacaatgacctcagag

SEQ ID NO: 381 - DNA, 20 bp, synthetic construct
  source 1..20: mol_type = other DNA
gaactctgcttcttgtgaat

SEQ ID NO: 382 - DNA, 20 bp, synthetic construct
  source 1..20: mol_type = other DNA
ggaactctgcttcttgtgaa

SEQ ID NO: 383 - DNA, 20 bp, synthetic construct
  source 1..20: mol_type = other DNA
tggaactctgcttcttgtga

SEQ ID NO: 384 - DNA, 20 bp, synthetic construct
  source 1..20: mol_type = other DNA
catggaactctgcttcttgt

SEQ ID NO: 385 - DNA, 20 bp, synthetic construct
  source 1..20: mol_type = other DNA
  modified_base 1..5: mod_base = OTHER; note = 2'-O-methoxyethyl ribonucleotide
  modified_base 16..20: mod_base = OTHER; note = 2'-O-methoxyethyl ribonucleotide
  modified_base 1..20: mod_base = OTHER; note = phosphorothioate linkage
  misc_feature 1..5: note = RNA
  misc_feature 6..15: note = DNA
  misc_feature 16..20: note = RNA
ctagatcttacaaaggaccc

SEQ ID NO: 386 - DNA, 20 bp, synthetic construct
  source 1..20: mol_type = other DNA
gactagatcttacaaaggac

SEQ ID NO: 387 - DNA, 20 bp, synthetic construct
  source 1..20: mol_type = other DNA
  modified_base 1..5: mod_base = OTHER; note = 2'-O-methoxyethyl ribonucleotide
  modified_base 16..20: mod_base = OTHER; note = 2'-O-methoxyethyl ribonucleotide
  modified_base 1..20: mod_base = OTHER; note = phosphorothioate linkage
  misc_feature 1..5: note = RNA
  misc_feature 6..15: note = DNA
  misc_feature 16..20: note = RNA
cttgggaaggtagaatctgg

SEQ ID NO: 388 - DNA, 20 bp, synthetic construct
  source 1..20: mol_type = other DNA
gaaggacacttgggcagatt

SEQ ID NO: 389 - DNA, 20 bp, synthetic construct
  source 1..20: mol_type = other DNA
tcagaaggacacttgggcag

SEQ ID NO: 390 - DNA, 20 bp, synthetic construct
  source 1..20: mol_type = other DNA
ttcagaaggacacttgggca

SEQ ID NO: 391 - DNA, 20 bp, synthetic construct
  source 1..20: mol_type = other DNA
gtgaaatgcccagacatgct

SEQ ID NO: 392 - DNA, 20 bp, synthetic construct
  source 1..20: mol_type = other DNA
gagtgaaatgcccagacatg

SEQ ID NO: 393 - DNA, 20 bp, synthetic construct
  source 1..20: mol_type = other DNA
ggatcatagactcacccatg

SEQ ID NO: 394 - DNA, 20 bp, synthetic construct
  source 1..20: mol_type = other DNA
caggatcatagactcaccca

SEQ ID NO: 395 - DNA, 16 bp, synthetic construct
  source 1..16: mol_type = other DNA
gatcatagactcaccc

SEQ ID NO: 396 - DNA, 16 bp, synthetic construct
  source 1..16: mol_type = other DNA
ggatcatagactcacc

SEQ ID NO: 397 - DNA, 20 bp, synthetic construct
  source 1..20: mol_type = other DNA
gacaggatcatagactcacc

SEQ ID NO: 398 - DNA, 20 bp, synthetic construct
  source 1..20: mol_type = other DNA
cagagacaggatcatagact

SEQ ID NO: 399 - DNA, 20 bp, synthetic construct
  source 1..20: mol_type = other DNA
tgtgcagagacaggatcata

SEQ ID NO: 400 - DNA, 20 bp, synthetic construct
  source 1..20: mol_type = other DNA
tgtgagtgcctgagtctatc

SEQ ID NO: 401 - DNA, 20 bp, synthetic construct
  source 1..20: mol_type = other DNA
gtgtgagtgcctgagtctat

SEQ ID NO: 402 - DNA, 20 bp, synthetic construct
  source 1..20: mol_type = other DNA
tttgagtgggtgtgagtgcc

SEQ ID NO: 403 - DNA, 20 bp, synthetic construct
  source 1..20: mol_type = other DNA
gtttgagtgggtgtgagtgc

SEQ ID NO: 404 - DNA, 20 bp, synthetic construct
  source 1..20: mol_type = other DNA
tgggtttgagtgggtgtgag

SEQ ID NO: 405 - DNA, 20 bp, synthetic construct
  source 1..20: mol_type = other DNA
gtgggtttgagtgggtgtga

SEQ ID NO: 406 - DNA, 20 bp, synthetic construct
  source 1..20: mol_type = other DNA
gatgtgtgtgtaagtgtgca

SEQ ID NO: 407 - DNA, 20 bp, synthetic construct
  source 1..20: mol_type = other DNA
tagatgtgtgtgtaagtgtg

SEQ ID NO: 408 - DNA, 20 bp, synthetic construct
  source 1..20: mol_type = other DNA
gtagatgtgtgtgtaagtgt

SEQ ID NO: 409 - DNA, 20 bp, synthetic construct
  source 1..20: mol_type = other DNA
tgtagatgtgtgtgtaagtg

SEQ ID NO: 410 - DNA, 20 bp, synthetic construct
  source 1..20: mol_type = other DNA
gtgtagatgtgtgtgtaagt

SEQ ID NO: 411 - DNA, 16 bp, synthetic construct
  source 1..16: mol_type = other DNA
gaaatggtgggctgtc

SEQ ID NO: 412 - DNA, 20 bp, synthetic construct
  source 1..20: mol_type = other DNA
caaatctcactgccctgcca

SEQ ID NO: 413 - DNA, 20 bp, synthetic construct
  source 1..20: mol_type = other DNA
gttcaaatctcactgccctg

SEQ ID NO: 414 - DNA, 20 bp, synthetic construct
  source 1..20: mol_type = other DNA
ggtctgatactctgaagttc

SEQ ID NO: 415 - DNA, 20 bp, synthetic construct
  source 1..20: mol_type = other DNA
gtaggaaagaaccagccttt

SEQ ID NO: 416 - DNA, 20 bp, synthetic construct
  source 1..20: mol_type = other DNA
cataatgttcaggaaagaca

SEQ ID NO: 417 - DNA, 20 bp, synthetic construct
  source 1..20: mol_type = other DNA
tcataatgttcaggaaagac

SEQ ID NO: 418 - DNA, 20 bp, synthetic construct
  source 1..20: mol_type = other DNA
gttcataatgttcaggaaag

SEQ ID NO: 419 - DNA, 16 bp, synthetic construct
  source 1..16: mol_type = other DNA
cctagaagggtgcaac

SEQ ID NO: 420 - DNA, 20 bp, synthetic construct
  source 1..20: mol_type = other DNA
tgttattctgaagttgggcc

SEQ ID NO: 421 - DNA, 20 bp, synthetic construct
  source 1..20: mol_type = other DNA
ttgttattctgaagttgggc

SEQ ID NO: 422 - DNA, 20 bp, synthetic construct
  source 1..20: mol_type = other DNA
gttgttattctgaagttggg

SEQ ID NO: 423 - DNA, 20 bp, synthetic construct
  source 1..20: mol_type = other DNA
tgttgttattctgaagttgg

SEQ ID NO: 424 - DNA, 20 bp, synthetic construct
  source 1..20: mol_type = other DNA
cctggcacaatcatttgttg

SEQ ID NO: 425 - DNA, 20 bp, synthetic construct
  source 1..20: mol_type = other DNA
cctttgaaattggagacaat

SEQ ID NO: 426 - DNA, 20 bp, synthetic construct
  source 1..20: mol_type = other DNA
caactgacttgacttctctg

SEQ ID NO: 427 - DNA, 20 bp, synthetic construct
  source 1..20: mol_type = other DNA
gcaactgacttgacttctct

SEQ ID NO: 428 - DNA, 20 bp, synthetic construct
  source 1..20: mol_type = other DNA
ggcaactgacttgacttctc

SEQ ID NO: 429 - DNA, 20 bp, synthetic construct
  source 1..20: mol_type = other DNA
tagccacttctttagatgaa

SEQ ID NO: 430 - DNA, 20 bp, synthetic construct
  source 1..20: mol_type = other DNA
caaatagccacttctttaga

SEQ ID NO: 431 - DNA, 20 bp, synthetic construct
  source 1..20: mol_type = other DNA
gcaaatagccacttctttag

SEQ ID NO: 432 - DNA, 20 bp, synthetic construct
  source 1..20: mol_type = other DNA
tgcaaatagccacttcttta

SEQ ID NO: 433 - DNA, 20 bp, synthetic construct
  source 1..20: mol_type = other DNA
tatgcaaatagccacttctt

SEQ ID NO: 434 - DNA, 20 bp, synthetic construct
  source 1..20: mol_type = other DNA
ttatgcaaatagccacttct

SEQ ID NO: 435 - DNA, 20 bp, synthetic construct
  source 1..20: mol_type = other DNA
tttatgcaaatagccacttc

SEQ ID NO: 436 - DNA, 20 bp, synthetic construct
  source 1..20: mol_type = other DNA
gtttatgcaaatagccactt

SEQ ID NO: 437 - DNA, 20 bp, synthetic construct
  source 1..20: mol_type = other DNA
tgtttatgcaaatagccact

SEQ ID NO: 438 - DNA, 20 bp, synthetic construct
  source 1..20: mol_type = other DNA
gaagcctgtttatgcaaata

SEQ ID NO: 439 - DNA, 20 bp, synthetic construct
  source 1..20: mol_type = other DNA
ggaagcctgtttatgcaaat

SEQ ID NO: 440 - DNA, 20 bp, synthetic construct
  source 1..20: mol_type = other DNA
tggaagcctgtttatgcaaa

SEQ ID NO: 441 - DNA, 20 bp, synthetic construct
  source 1..20: mol_type = other DNA
gatggaagcctgtttatgca

SEQ ID NO: 442 - DNA, 20 bp, synthetic construct
  source 1..20: mol_type = other DNA
gatctttccaactactggtg

SEQ ID NO: 443 - DNA, 20 bp, synthetic construct
  source 1..20: mol_type = other DNA
tgatctttccaactactggt

SEQ ID NO: 444 - DNA, 20 bp, synthetic construct
  source 1..20: mol_type = other DNA
ctgatctttccaactactgg

SEQ ID NO: 445 - DNA, 20 bp, synthetic construct
  source 1..20: mol_type = other DNA
cacaatagttctccagcaaa

SEQ ID NO: 446 - DNA, 20 bp, synthetic construct
  source 1..20: mol_type = other DNA
tcacaatagttctccagcaa

SEQ ID NO: 447 - DNA, 20 bp, synthetic construct
  source 1..20: mol_type = other DNA
ctcacaatagttctccagca

SEQ ID NO: 448 - DNA, 20 bp, synthetic construct
  source 1..20: mol_type = other DNA
gctcacaatagttctccagc

SEQ ID NO: 449 - DNA, 20 bp, synthetic construct
  source 1..20: mol_type = other DNA
cagctcacaatagttctcca

SEQ ID NO: 450 - DNA, 20 bp, synthetic construct
  source 1..20: mol_type = other DNA
tcagctcacaatagttctcc

SEQ ID NO: 451 - DNA, 20 bp, synthetic construct
  source 1..20: mol_type = other DNA
tctgactctacagctataaa

SEQ ID NO: 452 - DNA, 20 bp, synthetic construct
  source 1..20: mol_type = other DNA
ttctgactctacagctataa

SEQ ID NO: 453 - DNA, 20 bp, synthetic construct
  source 1..20: mol_type = other DNA
cttctgactctacagctata

SEQ ID NO: 454 - DNA, 20 bp, synthetic construct
  source 1..20: mol_type = other DNA
tcaatgagagaagcctgatc

SEQ ID NO: 455 - DNA, 20 bp, synthetic construct
  source 1..20: mol_type = other DNA
tggatcaatgagagaagcct

SEQ ID NO: 456 - DNA, 20 bp, synthetic construct
  source 1..20: mol_type = other DNA
catgtagatttggaaatagg

SEQ ID NO: 457 - DNA, 20 bp, synthetic construct
  source 1..20: mol_type = other DNA
ctagaagccatgtagatttg

SEQ ID NO: 458 - DNA, 20 bp, synthetic construct
  source 1..20: mol_type = other DNA
tgtatgtggctgtgtgtgtc

SEQ ID NO: 459 - DNA, 20 bp, synthetic construct
  source 1..20: mol_type = other DNA
ttgtatgtggctgtgtgtgt

SEQ ID NO: 460 - DNA, 20 bp, synthetic construct
  source 1..20: mol_type = other DNA
gttgtatgtggctgtgtgtg

SEQ ID NO: 461 - DNA, 20 bp, synthetic construct
  source 1..20: mol_type = other DNA
tgttgtatgtggctgtgtgt

SEQ ID NO: 462 - DNA, 20 bp, synthetic construct
  source 1..20: mol_type = other DNA
ctgttgtatgtggctgtgtg

SEQ ID NO: 463 - DNA, 20 bp, synthetic construct
  source 1..20: mol_type = other DNA
tctgttgtatgtggctgtgt

SEQ ID NO: 464 - DNA, 20 bp, synthetic construct
  source 1..20: mol_type = other DNA
gtctgttgtatgtggctgtg

SEQ ID NO: 465 - DNA, 20 bp, synthetic construct
  source 1..20: mol_type = other DNA
gctgtaattctttccaacat

SEQ ID NO: 466 - DNA, 20 bp, synthetic construct
  source 1..20: mol_type = other DNA
gagctgtaattctttccaac

SEQ ID NO: 467 - DNA, 20 bp, synthetic construct
  source 1..20: mol_type = other DNA
caagagctgtaattctttcc

SEQ ID NO: 468 - DNA, 20 bp, synthetic construct
  source 1..20: mol_type = other DNA
ccaagagctgtaattctttc

SEQ ID NO: 469 - DNA, 20 bp, synthetic construct
  source 1..20: mol_type = other DNA
gccaagagctgtaattcttt

SEQ ID NO: 470 - DNA, 20 bp, synthetic construct
  source 1..20: mol_type = other DNA
caacagaatgagcataagcc

SEQ ID NO: 471 - DNA, 20 bp, synthetic construct
  source 1..20: mol_type = other DNA
tcacaacagaatgagcataa

SEQ ID NO: 472 - DNA, 20 bp, synthetic construct
  source 1..20: mol_type = other DNA
tttaccacttcccagccagg

SEQ ID NO: 473 - DNA, 20 bp, synthetic construct
  source 1..20: mol_type = other DNA
gatctattcacagctttacc

SEQ ID NO: 474 - DNA, 20 bp, synthetic construct
  source 1..20: mol_type = other DNA
catctagctcatgcctacac

SEQ ID NO: 475 - DNA, 20 bp, synthetic construct
  source 1..20: mol_type = other DNA
cagctctgcaacttcctagc

SEQ ID NO: 476 - DNA, 20 bp, synthetic construct
  source 1..20: mol_type = other DNA
tcagctctgcaacttcctag

SEQ ID NO: 477 - DNA, 20 bp, synthetic construct
  source 1..20: mol_type = other DNA
tcaatattagagaatgggcc

SEQ ID NO: 478 - DNA, 20 bp, synthetic construct
  source 1..20: mol_type = other DNA
tgatgactgactgaatgagt

SEQ ID NO: 479 - DNA, 20 bp, synthetic construct
  source 1..20: mol_type = other DNA
ttgatgactgactgaatgag

SEQ ID NO: 480 - DNA, 20 bp, synthetic construct
  source 1..20: mol_type = other DNA
gttgatgactgactgaatga

SEQ ID NO: 481 - DNA, 20 bp, synthetic construct
  source 1..20: mol_type = other DNA
cacagcagtcagtaatagtt

SEQ ID NO: 482 - DNA, 20 bp, synthetic construct
  source 1..20: mol_type = other DNA
caacacagcagtcagtaata

SEQ ID NO: 483 - DNA, 20 bp, synthetic construct
  source 1..20: mol_type = other DNA
tgggcacaacacagcagtca

SEQ ID NO: 484 - DNA, 20 bp, synthetic construct
  source 1..20: mol_type = other DNA
ttgggcacaacacagcagtc

SEQ ID NO: 485 - DNA, 20 bp, synthetic construct
  source 1..20: mol_type = other DNA
cagagccaatatccacatgt

SEQ ID NO: 486 - DNA, 20 bp, synthetic construct
  source 1..20: mol_type = other DNA
gagacacacagagccatata

SEQ ID NO: 487 - DNA, 20 bp, synthetic construct
  source 1..20: mol_type = other DNA
ggagacacacagagccatat

SEQ ID NO: 488 - DNA, 20 bp, synthetic construct
  source 1..20: mol_type = other DNA
caggagacacacagagccat

SEQ ID NO: 489 - DNA, 20 bp, synthetic construct
  source 1..20: mol_type = other DNA
caagctctgatctgttgtcc

SEQ ID NO: 490 - DNA, 20 bp, synthetic construct
  source 1..20: mol_type = other DNA
ccaagctctgatctgttgtc

SEQ ID NO: 491 - DNA, 16 bp, synthetic construct
  source 1..16: mol_type = other DNA
tgtccatattggtgac

SEQ ID NO: 492 - DNA, 20 bp, synthetic construct
  source 1..20: mol_type = other DNA
tagatgtccatattggtgac

SEQ ID NO: 493 - DNA, 20 bp, synthetic construct
  source 1..20: mol_type = other DNA
ctagatgtccatattggtga

SEQ ID NO: 494 - DNA, 16 bp, synthetic construct
  source 1..16: mol_type = other DNA
gatgtccatattggtg

SEQ ID NO: 495 - DNA, 16 bp, synthetic construct
  source 1..16: mol_type = other DNA
ccagtgtaaagggtgc

SEQ ID NO: 496 - DNA, 20 bp, synthetic construct
  source 1..20: mol_type = other DNA
ctgtggtcctttgtgaagag

SEQ ID NO: 497 - DNA, 20 bp, synthetic construct
  source 1..20: mol_type = other DNA
cctgtggtcctttgtgaaga

SEQ ID NO: 498 - DNA, 20 bp, synthetic construct
  source 1..20: mol_type = other DNA
ttcagggacaaggatagcct

SEQ ID NO: 499 - DNA, 20 bp, synthetic construct
  source 1..20: mol_type = other DNA
tagtattcagggacaaggat

SEQ ID NO: 500 - DNA, 20 bp, synthetic construct
  source 1..20: mol_type = other DNA
ttagtattcagggacaagga

SEQ ID NO: 501 - DNA, 20 bp, synthetic construct
  source 1..20: mol_type = other DNA
cattagtattcagggacaag

SEQ ID NO: 502 - DNA, 20 bp, synthetic construct
  source 1..20: mol_type = other DNA
gacattagtattcagggaca

SEQ ID NO: 503 - DNA, 20 bp, synthetic construct
  source 1..20: mol_type = other DNA
tagacattagtattcaggga

SEQ ID NO: 504 - DNA, 20 bp, synthetic construct
  source 1..20: mol_type = other DNA
ttagacattagtattcaggg

SEQ ID NO: 505 - DNA, 16 bp, synthetic construct
  source 1..16: mol_type = other DNA
gacctttagacattag

SEQ ID NO: 506 - DNA, 20 bp, synthetic construct
  source 1..20: mol_type = other DNA
ggctgacctttagacattag

SEQ ID NO: 507 - DNA, 16 bp, synthetic construct
  source 1..16: mol_type = other DNA
ggctgacctttagaca

SEQ ID NO: 508 - DNA, 20 bp, synthetic construct
  source 1..20: mol_type = other DNA
cacatcacatgcacactgct

SEQ ID NO: 509 - DNA, 20 bp, synthetic construct
  source 1..20: mol_type = other DNA
gacacatcacatgcacactg

SEQ ID NO: 510 - DNA, 20 bp, synthetic construct
  source 1..20: mol_type = other DNA
ggacacatcacatgcacact

SEQ ID NO: 511 - DNA, 20 bp, synthetic construct
  source 1..20: mol_type = other DNA
gggacacatcacatgcacac

SEQ ID NO: 512 - DNA, 20 bp, synthetic construct
  source 1..20: mol_type = other DNA
tgggacacatcacatgcaca

SEQ ID NO: 513 - DNA, 20 bp, synthetic construct
  source 1..20: mol_type = other DNA
gacacagcttcttcctccaa

SEQ ID NO: 514 - DNA, 20 bp, synthetic construct
  source 1..20: mol_type = other DNA
tgatgggagggacacagctt

SEQ ID NO: 515 - DNA, 20 bp, synthetic construct
  source 1..20: mol_type = other DNA
gttataccctcaaagaaccc

SEQ ID NO: 516 - DNA, 16 bp, synthetic construct
  source 1..16: mol_type = other DNA
ggcatcataccttcac

SEQ ID NO: 517 - DNA, 16 bp, synthetic construct
  source 1..16: mol_type = other DNA
gggagggcatcatacc

SEQ ID NO: 518 - DNA, 20 bp, synthetic construct
  source 1..20: mol_type = other DNA
ggaagtaagaacccatctgg

SEQ ID NO: 519 - DNA, 20 bp, synthetic construct
  source 1..20: mol_type = other DNA
tttgtggaatgctggatatt

SEQ ID NO: 520 - DNA, 20 bp, synthetic construct
  source 1..20: mol_type = other DNA
ctttgtggaatgctggatat

SEQ ID NO: 521 - DNA, 20 bp, synthetic construct
  source 1..20: mol_type = other DNA
tctttgtggaatgctggata

SEQ ID NO: 522 - DNA, 20 bp, synthetic construct
  source 1..20: mol_type = other DNA
ttctttgtggaatgctggat

SEQ ID NO: 523 - DNA, 16 bp, synthetic construct
  source 1..16: mol_type = other DNA
tgattgggcaatatcc

SEQ ID NO: 524 - DNA, 16 bp, synthetic construct
  source 1..16: mol_type = other DNA
gtgattgggcaatatc

SEQ ID NO: 525 - DNA, 16 bp, synthetic construct
  source 1..16: mol_type = other DNA
ggtgattgggcaatat

SEQ ID NO: 526 - DNA, 16 bp, synthetic construct
  source 1..16: mol_type = other DNA
tggtgattgggcaata

SEQ ID NO: 527 - DNA, 20 bp, synthetic construct
  source 1..20: mol_type = other DNA
cagatgtccatgttggtgac

SEQ ID NO: 528 - DNA, 20 bp, synthetic construct
  source 1..20: mol_type = other DNA
tcagatgtccatgttggtga

SEQ ID NO: 529 - DNA, 20 bp, synthetic construct
  source 1..20: mol_type = other DNA
ttcagatgtccatgttggtg

SEQ ID NO: 530 - DNA, 20 bp, synthetic construct
  source 1..20: mol_type = other DNA
gttcagatgtccatgttggt

SEQ ID NO: 531 - DNA, 20 bp, synthetic construct
  source 1..20: mol_type = other DNA
ctccaaatacatccagagat

SEQ ID NO: 532 - DNA, 20 bp, synthetic construct
  source 1..20: mol_type = other DNA
gctccaaatacatccagaga

SEQ ID NO: 533 - DNA, 20 bp, synthetic construct
  source 1..20: mol_type = other DNA
agctccaaatacatccagag

SEQ ID NO: 534 - DNA, 20 bp, synthetic construct
  source 1..20: mol_type = other DNA
gggatatatgggaactttct

SEQ ID NO: 535 - DNA, 20 bp, synthetic construct
  source 1..20: mol_type = other DNA
agggatatatgggaactttc

SEQ ID NO: 536 - DNA, 20 bp, synthetic construct
  source 1..20: mol_type = other DNA
aagggatatatgggaacttt

SEQ ID NO: 537 - DNA, 20 bp, synthetic construct
  source 1..20: mol_type = other DNA
taagggatatatgggaactt

SEQ ID NO: 538 - DNA, 20 bp, synthetic construct
  source 1..20: mol_type = other DNA
tgatgatgtaggaggttaac

SEQ ID NO: 539 - DNA, 20 bp, synthetic construct
  source 1..20: mol_type = other DNA
catgatgatgtaggaggtta

SEQ ID NO: 540 - DNA, 20 bp, synthetic construct
  source 1..20: mol_type = other DNA
gcaaatgttccatgatgatg

SEQ ID NO: 541 - DNA, 20 bp, synthetic construct
  source 1..20: mol_type = other DNA
ggcaaatgttccatgatgat

SEQ ID NO: 542 - DNA, 20 bp, synthetic construct
  source 1..20: mol_type = other DNA
tggcaaatgttccatgatga

SEQ ID NO: 543 - DNA, 20 bp, synthetic construct
  source 1..20: mol_type = other DNA
ttggcaaatgttccatgatg

SEQ ID NO: 544 - DNA, 20 bp, synthetic construct
  source 1..20: mol_type = other DNA
ttcacagcaaagcaccagtg

SEQ ID NO: 545 - DNA, 20 bp, synthetic construct
  source 1..20: mol_type = other DNA
gttcacagcaaagcaccagt

SEQ ID NO: 546 - DNA, 20 bp, synthetic construct
  source 1..20: mol_type = other DNA
tagttcacagcaaagcacca

SEQ ID NO: 547 - DNA, 20 bp, synthetic construct
  source 1..20: mol_type = other DNA
ttagttcacagcaaagcacc

SEQ ID NO: 548 - DNA, 20 bp, synthetic construct
  source 1..20: mol_type = other DNA
tttagttcacagcaaagcac

SEQ ID NO: 549 - DNA, 20 bp, synthetic construct
  source 1..20: mol_type = other DNA
gagtttagttcacagcaaag

SEQ ID NO: 550 - DNA, 20 bp, synthetic construct
  source 1..20: mol_type = other DNA
ggagtttagttcacagcaaa

SEQ ID NO: 551 - DNA, 20 bp, synthetic construct
  source 1..20: mol_type = other DNA
caaatgcaatgtgatatcct

SEQ ID NO: 552 - DNA, 20 bp, synthetic construct
  source 1..20: mol_type = other DNA
ccaaatgcaatgtgatatcc

SEQ ID NO: 553 - DNA, 20 bp, synthetic construct
  source 1..20: mol_type = other DNA
ccaaggagacacaaacacca

SEQ ID NO: 554 - DNA, 20 bp, synthetic construct
  source 1..20: mol_type = other DNA
tggaatacctgaccagtact

SEQ ID NO: 555 - DNA, 20 bp, synthetic construct
  source 1..20: mol_type = other DNA
tatggaatacctgaccagta

SEQ ID NO: 556 - DNA, 20 bp, synthetic construct
  source 1..20: mol_type = other DNA
ctatggaatacctgaccagt

SEQ ID NO: 557 - DNA, 20 bp, synthetic construct
  source 1..20: mol_type = other DNA
gctaacagtaggacattcta

SEQ ID NO: 558 - DNA, 16 bp, synthetic construct
  source 1..16: mol_type = other DNA
gctaacagtaggacat

SEQ ID NO: 559 - DNA, 20 bp, synthetic construct
  source 1..20: mol_type = other DNA
ggatcatttctcatcactgc

SEQ ID NO: 560 - DNA, 20 bp, synthetic construct
  source 1..20: mol_type = other DNA
gttctccacaaatatgtcct

SEQ ID NO: 561 - DNA, 20 bp, synthetic construct
  source 1..20: mol_type = other DNA
tgttctccacaaatatgtcc

SEQ ID NO: 562 - DNA, 20 bp, synthetic construct
  source 1..20: mol_type = other DNA
ctgttctccacaaatatgtc

SEQ ID NO: 563 - DNA, 20 bp, synthetic construct
  source 1..20: mol_type = other DNA
tctgttctccacaaatatgt

SEQ ID NO: 564 - DNA, 20 bp, synthetic construct
  source 1..20: mol_type = other DNA
gtctgttctccacaaatatg

SEQ ID NO: 565 - DNA, 20 bp, synthetic construct
  source 1..20: mol_type = other DNA
cattgaagtctccaaagagc

SEQ ID NO: 566 - DNA, 20 bp, synthetic construct
  source 1..20: mol_type = other DNA
gaacattgaagtctccaaag

SEQ ID NO: 567 - DNA, 20 bp, synthetic construct
  source 1..20: mol_type = other DNA
ggaaggaacattgaagtctc

SEQ ID NO: 568 - DNA, 20 bp, synthetic construct
  source 1..20: mol_type = other DNA
tctgataaacactgcacaaa

SEQ ID NO: 569 - DNA, 20 bp, synthetic construct
  source 1..20: mol_type = other DNA
gtctgataaacactgcacaa

SEQ ID NO: 570 - DNA, 20 bp, synthetic construct
  source 1..20: mol_type = other DNA
tgtctgataaacactgcaca

SEQ ID NO: 571 - DNA, 20 bp, synthetic construct
  source 1..20: mol_type = other DNA
tcccaaagtctgccttcaca

SEQ ID NO: 572 - DNA, 20 bp, synthetic construct
  source 1..20: mol_type = other DNA
tacacattacaattctgccc

SEQ ID NO: 573 - DNA, 20 bp, synthetic construct
  source 1..20: mol_type = other DNA
gtacacattacaattctgcc

SEQ ID NO: 574 - DNA, 20 bp, synthetic construct
  source 1..20: mol_type = other DNA
tgtacacattacaattctgc

SEQ ID NO: 575 - DNA, 20 bp, synthetic construct
  source 1..20: mol_type = other DNA
caacctgacttcattagacc

SEQ ID NO: 576 - DNA, 20 bp, synthetic construct
  source 1..20: mol_type = other DNA
gcaacctgacttcattagac

SEQ ID NO: 577 - DNA, 20 bp, synthetic construct
  source 1..20: mol_type = other DNA
ggcaacctgacttcattaga

SEQ ID NO: 578 - DNA, 20 bp, synthetic construct
  source 1..20: mol_type = other DNA
caaggcaacctgacttcatt

SEQ ID NO: 579 - DNA, 20 bp, synthetic construct
  source 1..20: mol_type = other DNA
caacctggcataacacactt

SEQ ID NO: 580 - DNA, 20 bp, synthetic construct
  source 1..20: mol_type = other DNA
catcatgtttctagggtttc

SEQ ID NO: 581 - DNA, 20 bp, synthetic construct
  source 1..20: mol_type = other DNA
gcatcatgtttctagggttt

SEQ ID NO: 582 - DNA, 20 bp, synthetic construct
  source 1..20: mol_type = other DNA
tgcatcatgtttctagggtt

SEQ ID NO: 583 - DNA, 20 bp, synthetic construct
  source 1..20: mol_type = other DNA
ttgcatcatgtttctagggt

SEQ ID NO: 584 - DNA, 20 bp, synthetic construct
  source 1..20: mol_type = other DNA
tttgcatcatgtttctaggg

SEQ ID NO: 585 - DNA, 20 bp, synthetic construct
  source 1..20: mol_type = other DNA
ctttgcatcatgtttctagg

SEQ ID NO: 586 - DNA, 20 bp, synthetic construct
  source 1..20: mol_type = other DNA
gctttgcatcatgtttctag

SEQ ID NO: 587 - DNA, 20 bp, synthetic construct
  source 1..20: mol_type = other DNA
tcttaggcaagtccctttag

SEQ ID NO: 588 - DNA, 20 bp, synthetic construct
  source 1..20: mol_type = other DNA
ctcttatactatgacaactc

SEQ ID NO: 589 - DNA, 20 bp, synthetic construct
  source 1..20: mol_type = other DNA
cctcttatactatgacaact

SEQ ID NO: 590 - DNA, 20 bp, synthetic construct
  source 1..20: mol_type = other DNA
tcctcttatactatgacaac

SEQ ID NO: 591 - DNA, 20 bp, synthetic construct
  source 1..20: mol_type = other DNA
caatcctcttatactatgac

SEQ ID NO: 592 - DNA, 20 bp, synthetic construct
  source 1..20: mol_type = other DNA
ccaatcctcttatactatga

SEQ ID NO: 593 - DNA, 20 bp, synthetic construct
  source 1..20: mol_type = other DNA
gaacactatcaatcctccaa

SEQ ID NO: 594 - DNA, 20 bp, synthetic construct
  source 1..20: mol_type = other DNA
taagaacactatcaatcctc

SEQ ID NO: 595 - DNA, 20 bp, synthetic construct
  source 1..20: mol_type = other DNA
gttaagaacactatcaatcc

SEQ ID NO: 596 - DNA, 20 bp, synthetic construct
  source 1..20: mol_type = other DNA
ctgaagttaagaacactatc

SEQ ID NO: 597 - DNA, 20 bp, synthetic construct
  source 1..20: mol_type = other DNA
cctgaagttaagaacactat

SEQ ID NO: 598 - DNA, 20 bp, synthetic construct
  source 1..20: mol_type = other DNA
ccctgaagttaagaacacta

SEQ ID NO: 599 - DNA, 20 bp, synthetic construct
  source 1..20: mol_type = other DNA
tccctgaagttaagaacact

SEQ ID NO: 600 - DNA, 20 bp, synthetic construct
  source 1..20: mol_type = other DNA
ctccctgaagttaagaacac

SEQ ID NO: 601 - DNA, 20 bp, synthetic construct
  source 1..20: mol_type = other DNA
tctccctgaagttaagaaca

SEQ ID NO: 602 - DNA, 20 bp, synthetic construct
  source 1..20: mol_type = other DNA
ttctccctgaagttaagaac

SEQ ID NO: 603 - DNA, 20 bp, synthetic construct
  source 1..20: mol_type = other DNA
gattctccctgaagttaaga

SEQ ID NO: 604 - DNA, 20 bp, synthetic construct
  source 1..20: mol_type = other DNA
tagattctccctgaagttaa

SEQ ID NO: 605 - DNA, 20 bp, synthetic construct
  source 1..20: mol_type = other DNA
ttagattctccctgaagtta

SEQ ID NO: 606 - DNA, 20 bp, synthetic construct
  source 1..20: mol_type = other DNA
cttagattctccctgaagtt

SEQ ID NO: 607 - DNA, 20 bp, synthetic construct
  source 1..20: mol_type = other DNA
tcttagattctccctgaagt

SEQ ID NO: 608 - DNA, 20 bp, synthetic construct
  source 1..20: mol_type = other DNA
gtcttagattctccctgaag

SEQ ID NO: 609 - DNA, 20 bp, synthetic construct
  source 1..20: mol_type = other DNA
gagactccattcttctgagc

SEQ ID NO: 610 - DNA, 20 bp, synthetic construct
  source 1..20: mol_type = other DNA
tgagactccattcttctgag

SEQ ID NO: 611 - DNA, 20 bp, synthetic construct
  source 1..20: mol_type = other DNA
ttgagactccattcttctga

SEQ ID NO: 612 - DNA, 20 bp, synthetic construct
  source 1..20: mol_type = other DNA
tatttgcctgatgtcttgag

SEQ ID NO: 613 - DNA, 20 bp, synthetic construct
  source 1..20: mol_type = other DNA
gtatttgcctgatgtcttga

SEQ ID NO: 614 - DNA, 20 bp, synthetic construct
  source 1..20: mol_type = other DNA
gaacttggctctgatctctt

SEQ ID NO: 615 - DNA, 20 bp, synthetic construct
  source 1..20: mol_type = other DNA
gctgccctttagaacttggc

SEQ ID NO: 616 - DNA, 20 bp, synthetic construct
  source 1..20: mol_type = other DNA
tggttgacatttgggaaatg

SEQ ID NO: 617 - DNA, 20 bp, synthetic construct
  source 1..20: mol_type = other DNA
ttggttgacatttgggaaat

SEQ ID NO: 618 - DNA, 20 bp, synthetic construct
  source 1..20: mol_type = other DNA
cttggttgacatttgggaaa

SEQ ID NO: 619 - DNA, 20 bp, synthetic construct
  source 1..20: mol_type = other DNA
gaaatcataattctcttggc

SEQ ID NO: 620 - DNA, 20 bp, synthetic construct
  source 1..20: mol_type = other DNA
ggaaatcataattctcttgg

SEQ ID NO: 621 - DNA, 20 bp, synthetic construct
  source 1..20: mol_type = other DNA
ccaggaaatcataattctct

SEQ ID NO: 622 - DNA, 16 bp, synthetic construct
  source 1..16: mol_type = other DNA
ctgtcattgtatagcc

SEQ ID NO: 623 - DNA, 20 bp, synthetic construct
  source 1..20: mol_type = other DNA
ttgcactccagctttgatca

SEQ ID NO: 624 - DNA, 20 bp, synthetic construct
  source 1..20: mol_type = other DNA
taacttgcactccagctttg

SEQ ID NO: 625 - DNA, 16 bp, synthetic construct
  source 1..16: mol_type = other DNA
cttgagtaccttacac

SEQ ID NO: 626 - DNA, 20 bp, synthetic construct
  source 1..20: mol_type = other DNA
gacacagaccctagcacttg

SEQ ID NO: 627 - DNA, 20 bp, synthetic construct
  source 1..20: mol_type = other DNA
ggacacagaccctagcactt

SEQ ID NO: 628 - DNA, 20 bp, synthetic construct
  source 1..20: mol_type = other DNA
tggacacagaccctagcact

SEQ ID NO: 629 - DNA, 20 bp, synthetic construct
  source 1..20: mol_type = other DNA
ttggacacagaccctagcac

SEQ ID NO: 630 - DNA, 20 bp, synthetic construct
  source 1..20: mol_type = other DNA
cttggacacagaccctagca

SEQ ID NO: 631 - DNA, 20 bp, synthetic construct
  source 1..20: mol_type = other DNA
gattgggcttggacacagac

SEQ ID NO: 632 - DNA, 20 bp, synthetic construct
  source 1..20: mol_type = other DNA
tgattgggcttggacacaga

SEQ ID NO: 633 - DNA, 20 bp, synthetic construct
  source 1..20: mol_type = other DNA
ttgattgggcttggacacag

SEQ ID NO: 634 - DNA, 16 bp, synthetic construct
  source 1..16: mol_type = other DNA
gattgggcttggacac

SEQ ID NO: 635 - DNA, 16 bp, synthetic construct
  source 1..16: mol_type = other DNA
tgattgggcttggaca

SEQ ID NO: 636 - DNA, 16 bp, synthetic construct
  source 1..16: mol_type = other DNA
ttgattgggcttggac

SEQ ID NO: 637 - DNA, 20 bp, synthetic construct
  source 1..20: mol_type = other DNA
ttaaggaagaggtgctgttg

SEQ ID NO: 638 - DNA, 20 bp, synthetic construct
  source 1..20: mol_type = other DNA
tttaaggaagaggtgctgtt

SEQ ID NO: 639 - DNA, 20 bp, synthetic construct
  source 1..20: mol_type = other DNA
ctaagattgctactttaagg

SEQ ID NO: 640 - DNA, 20 bp, synthetic construct
  source 1..20: mol_type = other DNA
gctaagattgctactttaag

SEQ ID NO: 641 - DNA, 20 bp, synthetic construct
  source 1..20: mol_type = other DNA
ctgctaagattgctacttta

SEQ ID NO: 642 - DNA, 20 bp, synthetic construct
  source 1..20: mol_type = other DNA
tctgctaagattgctacttt

SEQ ID NO: 643 - DNA, 20 bp, synthetic construct
  source 1..20: mol_type = other DNA
tcatgtaaggtggcagtctg

SEQ ID NO: 644 - DNA, 20 bp, synthetic construct
  source 1..20: mol_type = other DNA
gatagttcagtcttcattgt

SEQ ID NO: 645 - DNA, 20 bp, synthetic construct
  source 1..20: mol_type = other DNA
catctttcttaggtaatgtg

SEQ ID NO: 646 - DNA, 20 bp, synthetic construct
  source 1..20: mol_type = other DNA
ccatctttcttaggtaatgt

SEQ ID NO: 647 - DNA, 20 bp, synthetic construct
  source 1..20: mol_type = other DNA
cccatctttcttaggtaatg

SEQ ID NO: 648 - DNA, 20 bp, synthetic construct
  source 1..20: mol_type = other DNA
gtcatgtgccaatctgtcac

SEQ ID NO: 649 - DNA, 20 bp, synthetic construct
  source 1..20: mol_type = other DNA
ccagattatgtcatgtgcca

SEQ ID NO: 650 - DNA, 20 bp, synthetic construct
  source 1..20: mol_type = other DNA
cccagattatgtcatgtgcc

SEQ ID NO: 651 - DNA, 20 bp, synthetic construct
  source 1..20: mol_type = other DNA
gaacccagattatgtcatgt

SEQ ID NO: 652 - DNA, 20 bp, synthetic construct
  source 1..20: mol_type = other DNA
taaagaacccagattatgtc

SEQ ID NO: 653 - DNA, 20 bp, synthetic construct
  source 1..20: mol_type = other DNA
gtctataaagaacccagatt

SEQ ID NO: 654 - DNA, 20 bp, synthetic construct
  source 1..20: mol_type = other DNA
gagtctataaagaacccaga

SEQ ID NO: 655 - DNA, 20 bp, synthetic construct
  source 1..20: mol_type = other DNA
caactgagtctataaagaac

SEQ ID NO: 656 - DNA, 20 bp, synthetic construct
  source 1..20: mol_type = other DNA
gttggtacaagataaagcta

SEQ ID NO: 657 - DNA, 20 bp, synthetic construct
  source 1..20: mol_type = other DNA
ggttggtacaagataaagct

SEQ ID NO: 658 - DNA, 20 bp, synthetic construct
  source 1..20: mol_type = other DNA
tggttggtacaagataaagc

SEQ ID NO: 659 - DNA, 20 bp, synthetic construct
  source 1..20: mol_type = other DNA
tggtggttggtacaagataa

SEQ ID NO: 660 - DNA, 20 bp, synthetic construct
  source 1..20: mol_type = other DNA
ctggtggttggtacaagata

SEQ ID NO: 661 - DNA, 16 bp, synthetic construct
  source 1..16: mol_type = other DNA
ctggtggttggtacaa

SEQ ID NO: 662 - DNA, 20 bp, synthetic construct
  source 1..20: mol_type = other DNA
taagagaaagagcctattcc

SEQ ID NO: 663 - DNA, 20 bp, synthetic construct
  source 1..20: mol_type = other DNA
ttaagagaaagagcctattc

SEQ ID NO: 664 - DNA, 20 bp, synthetic construct
  source 1..20: mol_type = other DNA
cattaagagaaagagcctat

SEQ ID NO: 665 - DNA, 20 bp, synthetic construct
  source 1..20: mol_type = other DNA
tcattaagagaaagagccta

SEQ ID NO: 666 - DNA, 20 bp, synthetic construct
  source 1..20: mol_type = other DNA
gtcattaagagaaagagcct

SEQ ID NO: 667 - DNA, 20 bp, synthetic construct
  source 1..20: mol_type = other DNA
tgttggaagtcattaagaga

SEQ ID NO: 668 - DNA, 20 bp, synthetic construct
  source 1..20: mol_type = other DNA
ctatgttggaagtcattaag

SEQ ID NO: 669 - DNA, 20 bp, synthetic construct
  source 1..20: mol_type = other DNA
gaactatgttggaagtcatt

SEQ ID NO: 670 - DNA, 20 bp, synthetic construct
  source 1..20: mol_type = other DNA
gagaactatgttggaagtca

SEQ ID NO: 671 - DNA, 20 bp, synthetic construct
  source 1..20: mol_type = other DNA
ttgagagaactatgttggaa

SEQ ID NO: 672 - DNA, 20 bp, synthetic construct
  source 1..20: mol_type = other DNA
tttgagagaactatgttgga

SEQ ID NO: 673 - DNA, 20 bp, synthetic construct
  source 1..20: mol_type = other DNA
gtttgagagaactatgttgg

SEQ ID NO: 674 - DNA, 20 bp, synthetic construct
  source 1..20: mol_type = other DNA
tctggaggagtaaggtttga

SEQ ID NO: 675 - DNA, 20 bp, synthetic construct
  source 1..20: mol_type = other DNA
ctgaagtagccatagccagg

SEQ ID NO: 676 - DNA, 20 bp, synthetic construct
  source 1..20: mol_type = other DNA
tctgaagtagccatagccag

SEQ ID NO: 677 - DNA, 20 bp, synthetic construct
  source 1..20: mol_type = other DNA
ttctgaagtagccatagcca

SEQ ID NO: 678 - DNA, 20 bp, synthetic construct
  source 1..20: mol_type = other DNA
tttctgaagtagccatagcc

SEQ ID NO: 679 - DNA, 16 bp, synthetic construct
  source 1..16: mol_type = other DNA
ctattataccagaggc

SEQ ID NO: 680 - DNA, 20 bp, synthetic construct
  source 1..20: mol_type = other DNA
ttctgctctattataccaga

SEQ ID NO: 681 - DNA, 20 bp, synthetic construct
  source 1..20: mol_type = other DNA
gattctgctctattatacca

SEQ ID NO: 682 - DNA, 20 bp, synthetic construct
  source 1..20: mol_type = other DNA
tggtgattctgctctattat

SEQ ID NO: 683 - DNA, 20 bp, synthetic construct
  source 1..20: mol_type = other DNA
gaatgtgaggtggtgattct

SEQ ID NO: 684 - DNA, 20 bp, synthetic construct
  source 1..20: mol_type = other DNA
tagaatgtgaggtggtgatt

SEQ ID NO: 685 - DNA, 20 bp, synthetic construct
  source 1..20: mol_type = other DNA
cttgaaatagaatgtgaggt

SEQ ID NO: 686 - DNA, 20 bp, synthetic construct
  source 1..20: mol_type = other DNA
tggcttgaaatagaatgtga

SEQ ID NO: 687 - DNA, 20 bp, synthetic construct
  source 1..20: mol_type = other DNA
ttggcttgaaatagaatgtg

SEQ ID NO: 688 - DNA, 20 bp, synthetic construct
  source 1..20: mol_type = other DNA
ctttggcttgaaatagaatg

SEQ ID NO: 689 - DNA, 20 bp, synthetic construct
  source 1..20: mol_type = other DNA
gactttggcttgaaatagaa

SEQ ID NO: 690 - DNA, 20 bp, synthetic construct
  source 1..20: mol_type = other DNA
tgactttggcttgaaataga

SEQ ID NO: 691 - DNA, 20 bp, synthetic construct
  source 1..20: mol_type = other DNA
ttgactttggcttgaaatag

SEQ ID NO: 692 - DNA, 20 bp, synthetic construct
  source 1..20: mol_type = other DNA
gatattgactttggcttgaa

SEQ ID NO: 693 - DNA, 20 bp, synthetic construct
  source 1..20: mol_type = other DNA
gagatattgactttggcttg

SEQ ID NO: 694 - DNA, 20 bp, synthetic construct
  source 1..20: mol_type = other DNA
tgagatattgactttggctt

SEQ ID NO: 695 - DNA, 20 bp, synthetic construct
  source 1..20: mol_type = other DNA
ttgagatattgactttggct

SEQ ID NO: 696 - DNA, 20 bp, synthetic construct
  source 1..20: mol_type = other DNA
cagcctttgagatattgact

SEQ ID NO: 697 - DNA, 20 bp, synthetic construct
  source 1..20: mol_type = other DNA
ccagcctttgagatattgac

SEQ ID NO: 698 - DNA, 20 bp, synthetic construct
  source 1..20: mol_type = other DNA
gaaccagcctttgagatatt

SEQ ID NO: 699 - DNA, 20 bp, synthetic construct
  source 1..20: mol_type = other DNA
cagaaccagcctttgagata

SEQ ID NO: 700 - DNA, 20 bp, synthetic construct
  source 1..20: mol_type = other DNA
cacagaaccagcctttgaga

SEQ ID NO: 701 - DNA, 20 bp, synthetic construct
  source 1..20: mol_type = other DNA
tcacagaaccagcctttgag

SEQ ID NO: 702 - DNA, 20 bp, synthetic construct
  source 1..20: mol_type = other DNA
taaatcacagaaccagcctt

SEQ ID NO: 703 - DNA, 20 bp, synthetic construct
  source 1..20: mol_type = other DNA
tcagcactttcagtaggagc

SEQ ID NO: 704 - DNA, 20 bp, synthetic construct
  source 1..20: mol_type = other DNA
ttcagcactttcagtaggag

SEQ ID NO: 705 - DNA, 20 bp, synthetic construct
  source 1..20: mol_type = other DNA
tttcagcactttcagtagga

SEQ ID NO: 706 - DNA, 20 bp, synthetic construct
  source 1..20: mol_type = other DNA
catttcagcactttcagtag

SEQ ID NO: 707 - DNA, 20 bp, synthetic construct
  source 1..20: mol_type = other DNA
gacatttcagcactttcagt

SEQ ID NO: 708 - DNA, 20 bp, synthetic construct
  source 1..20: mol_type = other DNA
gctataagtctgaagtgtca

SEQ ID NO: 709 - DNA, 16 bp, synthetic construct
  source 1..16: mol_type = other DNA
ggagtctaggtagcta

SEQ ID NO: 710 - DNA, 20 bp, synthetic construct
  source 1..20: mol_type = other DNA
ggcaccctacactctttggt

SEQ ID NO: 711 - DNA, 20 bp, synthetic construct
  source 1..20: mol_type = other DNA
gaaggcaccctacactcttt

SEQ ID NO: 712 - DNA, 16 bp, synthetic construct
  source 1..16: mol_type = other DNA
gaaggcaccctacact

SEQ ID NO: 713 - DNA, 16 bp, synthetic construct
  source 1..16: mol_type = other DNA
gtgaaggcaccctaca

SEQ ID NO: 714 - DNA, 20 bp, synthetic construct
  source 1..20: mol_type = other DNA
catagaagattacctagcag

SEQ ID NO: 715 - DNA, 20 bp, synthetic construct
  source 1..20: mol_type = other DNA
gggcatagaagattacctag

SEQ ID NO: 716 - DNA, 20 bp, synthetic construct
  source 1..20: mol_type = other DNA
tagggcatagaagattacct

SEQ ID NO: 717 - DNA, 16 bp, synthetic construct
  source 1..16: mol_type = other DNA
ggcatagaagattacc

SEQ ID NO: 718 - DNA, 20 bp, synthetic construct
  source 1..20: mol_type = other DNA
ttagggcatagaagattacc

SEQ ID NO: 719 - DNA, 20 bp, synthetic construct
  source 1..20: mol_type = other DNA
cattagggcatagaagatta

SEQ ID NO: 720 - DNA, 20 bp, synthetic construct
  source 1..20: mol_type = other DNA
ccattagggcatagaagatt

SEQ ID NO: 721 - DNA, 16 bp, synthetic construct
  source 1..16: mol_type = other DNA
ccattagggcatagaa

SEQ ID NO: 722 - DNA, 20 bp, synthetic construct
  source 1..20: mol_type = other DNA
gaacttacttgtctgctgct

SEQ ID NO: 723 - DNA, 20 bp, synthetic construct
  source 1..20: mol_type = other DNA
tgaacttacttgtctgctgc

SEQ ID NO: 724 - DNA, 20 bp, synthetic construct
  source 1..20: mol_type = other DNA
ctgaacttacttgtctgctg

SEQ ID NO: 725 - DNA, 20 bp, synthetic construct
  source 1..20: mol_type = other DNA
ctcaagggcatggacacagc

SEQ ID NO: 726 - DNA, 20 bp, synthetic construct
  source 1..20: mol_type = other DNA
gtttccactgaacttgtctg

SEQ ID NO: 727 - DNA, 20 bp, synthetic construct
  source 1..20: mol_type = other DNA
caagatgaagttgatggatc

SEQ ID NO: 728 - DNA, 20 bp, synthetic construct
  source 1..20: mol_type = other DNA
cttagacaagatgaagttga

SEQ ID NO: 729 - DNA, 20 bp, synthetic construct
  source 1..20: mol_type = other DNA
gcttagacaagatgaagttg

SEQ ID NO: 730 - DNA, 20 bp, synthetic construct
  source 1..20: mol_type = other DNA
tgcttagacaagatgaagtt

SEQ ID NO: 731 - DNA, 20 bp, synthetic construct
  source 1..20: mol_type = other DNA
ctgcttagacaagatgaagt

SEQ ID NO: 732 - DNA, 20 bp, synthetic construct
  source 1..20: mol_type = other DNA
tctgcttagacaagatgaag

SEQ ID NO: 733 - DNA, 20 bp, synthetic construct
  source 1..20: mol_type = other DNA
ctctgcttagacaagatgaa

SEQ ID NO: 734 - DNA, 20 bp, synthetic construct
  source 1..20: mol_type = other DNA
gactctgcttagacaagatg

SEQ ID NO: 735 - DNA, 20 bp, synthetic construct
  source 1..20: mol_type = other DNA
tgactctgcttagacaagat

SEQ ID NO: 736 - DNA, 20 bp, synthetic construct
  source 1..20: mol_type = other DNA
tatgactctgcttagacaag

SEQ ID NO: 737 - DNA, 20 bp, synthetic construct
  source 1..20: mol_type = other DNA
ctatgactctgcttagacaa

SEQ ID NO: 738 - DNA, 20 bp, synthetic construct
  source 1..20: mol_type = other DNA
gctatgactctgcttagaca

SEQ ID NO: 739 - DNA, 20 bp, synthetic construct
  source 1..20: mol_type = other DNA
ttcagtcacacttctagcta

SEQ ID NO: 740 - DNA, 20 bp, synthetic construct
  source 1..20: mol_type = other DNA
tatttcagtcacacttctag

SEQ ID NO: 741 - DNA, 16 bp, synthetic construct
  source 1..16: mol_type = other DNA
gtaccagaactattac

SEQ ID NO: 742 - DNA, 20 bp, synthetic construct
  source 1..20: mol_type = other DNA
tgcagtaccagaactattac

SEQ ID NO: 743 - DNA, 20 bp, synthetic construct
  source 1..20: mol_type = other DNA
gagtagaggtgacagtatct

SEQ ID NO: 744 - DNA, 20 bp, synthetic construct
  source 1..20: mol_type = other DNA
gtagccttaaactttattgg

SEQ ID NO: 745 - DNA, 20 bp, synthetic construct
  source 1..20: mol_type = other DNA
catggcagaattgtaaacat

SEQ ID NO: 746 - DNA, 20 bp, synthetic construct
  source 1..20: mol_type = other DNA
gcatggcagaattgtaaaca

SEQ ID NO: 747 - DNA, 20 bp, synthetic construct
  source 1..20: mol_type = other DNA
ggacaagtatttacaccttg

SEQ ID NO: 748 - DNA, 20 bp, synthetic construct
  source 1..20: mol_type = other DNA
tggacaagtatttacacctt

SEQ ID NO: 749 - DNA, 20 bp, synthetic construct
  source 1..20: mol_type = other DNA
ctggacaagtatttacacct

SEQ ID NO: 750 - DNA, 16 bp, synthetic construct
  source 1..16: mol_type = other DNA
ggtctctttactggac

SEQ ID NO: 751 - DNA, 20 bp, synthetic construct
  source 1..20: mol_type = other DNA
gaagacctttagccactcag

SEQ ID NO: 752 - DNA, 16 bp, synthetic construct
  source 1..16: mol_type = other DNA
gacctttagccactca

SEQ ID NO: 753 - DNA, 20 bp, synthetic construct
  source 1..20: mol_type = other DNA
gaaagaagacctttagccac

SEQ ID NO: 754 - DNA, 20 bp, synthetic construct
  source 1..20: mol_type = other DNA
tgaaagaagacctttagcca

SEQ ID NO: 755 - DNA, 20 bp, synthetic construct
  source 1..20: mol_type = other DNA
tgtgaaagaagacctttagc

SEQ ID NO: 756 - DNA, 20 bp, synthetic construct
  source 1..20: mol_type = other DNA
gatgtgaaagaagaccttta

SEQ ID NO: 757 - DNA, 20 bp, synthetic construct
  source 1..20: mol_type = other DNA
tttgaggtgggcaaagatgt

SEQ ID NO: 758 - DNA, 20 bp, synthetic construct
  source 1..20: mol_type = other DNA
tcaggatttgaggtgggcaa

SEQ ID NO: 759 - DNA, 20 bp, synthetic construct
  source 1..20: mol_type = other DNA
ccagagaccttgccttcagg

SEQ ID NO: 760 - DNA, 20 bp, synthetic construct
  source 1..20: mol_type = other DNA
gaagacatcctcagcccacc

SEQ ID NO: 761 - DNA, 20 bp, synthetic construct
  source 1..20: mol_type = other DNA
cttgaccatattgcatcctg

SEQ ID NO: 762 - DNA, 20 bp, synthetic construct
  source 1..20: mol_type = other DNA
catccttgaccatattgcat

SEQ ID NO: 763 - DNA, 16 bp, synthetic construct
  source 1..16: mol_type = other DNA
ccttgaccatattgca

SEQ ID NO: 764 - DNA, 20 bp, synthetic construct
  source 1..20: mol_type = other DNA
tcatccttgaccatattgca

SEQ ID NO: 765 - DNA, 20 bp, synthetic construct
  source 1..20: mol_type = other DNA
tacatcttcaatgcagactt

SEQ ID NO: 766 - DNA, 20 bp, synthetic construct
  source 1..20: mol_type = other DNA
gaaatacatcttcaatgcag

SEQ ID NO: 767 - DNA, 20 bp, synthetic construct
  source 1..20: mol_type = other DNA
cagaaatacatcttcaatgc

SEQ ID NO: 768 - DNA, 20 bp, synthetic construct
  source 1..20: mol_type = other DNA
gcaacagaaatacatcttca

SEQ ID NO: 769 - DNA, 20 bp, synthetic construct
  source 1..20: mol_type = other DNA
ttcatcatttataaccaggg

SEQ ID NO: 770 - DNA, 20 bp, synthetic construct
  source 1..20: mol_type = other DNA
gacccattatagtttcatca

SEQ ID NO: 771 - DNA, 20 bp, synthetic construct
  source 1..20: mol_type = other DNA
cagacccattatagtttcat

SEQ ID NO: 772 - DNA, 16 bp, synthetic construct
  source 1..16: mol_type = other DNA
gacccattatagtttc

SEQ ID NO: 773 - DNA, 20 bp, synthetic construct
  source 1..20: mol_type = other DNA
tacagacccattatagtttc

SEQ ID NO: 774 - DNA, 16 bp, synthetic construct
  source 1..16: mol_type = other DNA
cagacccattatagtt

SEQ ID NO: 775 - DNA, 16 bp, synthetic construct
  source 1..16: mol_type = other DNA
tacagacccattatag

SEQ ID NO: 776 - DNA, 20 bp, synthetic construct
  source 1..20: mol_type = other DNA
ctattacagacccattatag

SEQ ID NO: 777 - DNA, 20 bp, synthetic construct
  source 1..20: mol_type = other DNA
gctattacagacccattata

SEQ ID NO: 778 - DNA, 16 bp, synthetic construct
  source 1..16: mol_type = other DNA
gctattacagacccat

SEQ ID NO: 779 - DNA, 20 bp, synthetic construct
  source 1..20: mol_type = other DNA
tacagacaagagctatatgg

SEQ ID NO: 780 - DNA, 20 bp, synthetic construct
  source 1..20: mol_type = other DNA
gtacagacaagagctatatg

SEQ ID NO: 781 - DNA, 20 bp, synthetic construct
  source 1..20: mol_type = other DNA
cacatgttagtaatggaagt

SEQ ID NO: 782 - DNA, 20 bp, synthetic construct
  source 1..20: mol_type = other DNA
ccacatgttagtaatggaag

SEQ ID NO: 783 - DNA, 20 bp, synthetic construct
  source 1..20: mol_type = other DNA
caccacatgttagtaatgga

SEQ ID NO: 784 - DNA, 20 bp, synthetic construct
  source 1..20: mol_type = other DNA
tcaccacatgttagtaatgg

SEQ ID NO: 785 - DNA, 20 bp, synthetic construct
  source 1..20: mol_type = other DNA
gtcaccacatgttagtaatg

SEQ ID NO: 786 - DNA, 20 bp, synthetic construct
  source 1..20: mol_type = other DNA
tgtcaccacatgttagtaat

SEQ ID NO: 787 - DNA, 20 bp, synthetic construct
  source 1..20: mol_type = other DNA
ttgtcaccacatgttagtaa

SEQ ID NO: 788 - DNA, 20 bp, synthetic construct
  source 1..20: mol_type = other DNA
cttgtcaccacatgttagta

SEQ ID NO: 789 - DNA, 20 bp, synthetic construct
  source 1..20: mol_type = other DNA
gcttgtcaccacatgttagt

SEQ ID NO: 790 - DNA, 20 bp, synthetic construct
  source 1..20: mol_type = other DNA
tgcttgtcaccacatgttag

SEQ ID NO: 791 - DNA, 20 bp, synthetic construct
  source 1..20: mol_type = other DNA
gaatgcttgtcaccacatgt

SEQ ID NO: 792 - DNA, 20 bp, synthetic construct
  source 1..20: mol_type = other DNA
gaagaatgcttgtcaccaca

SEQ ID NO: 793 - DNA, 20 bp, synthetic construct
  source 1..20: mol_type = other DNA
tgaagaatgcttgtcaccac

SEQ ID NO: 794 - DNA, 20 bp, synthetic construct
  source 1..20: mol_type = other DNA
gtaaatgaagaatgcttgtc

SEQ ID NO: 795 - DNA, 20 bp, synthetic construct
  source 1..20: mol_type = other DNA
ggtaaatgaagaatgcttgt

SEQ ID NO: 796 - DNA, 20 bp, synthetic construct
  source 1..20: mol_type = other DNA
tggtaaatgaagaatgcttg

SEQ ID NO: 797 - DNA, 20 bp, synthetic construct
  source 1..20: mol_type = other DNA
ctgtaagatagggtaaacta

SEQ ID NO: 798 - DNA, 20 bp, synthetic construct
  source 1..20: mol_type = other DNA
taactggctgtaagataggg

SEQ ID NO: 799 - DNA, 20 bp, synthetic construct
  source 1..20: mol_type = other DNA
tttatctaactggctgtaag

SEQ ID NO: 800 - DNA, 20 bp, synthetic construct
  source 1..20: mol_type = other DNA
catttatctaactggctgta

SEQ ID NO: 801 - DNA, 20 bp, synthetic construct
  source 1..20: mol_type = other DNA
tcatttatctaactggctgt

SEQ ID NO: 802 - DNA, 20 bp, synthetic construct
  source 1..20: mol_type = other DNA
tccagtgacctcagtactca

SEQ ID NO: 803 - DNA, 20 bp, synthetic construct
  source 1..20: mol_type = other DNA
ttccagtgacctcagtactc

SEQ ID NO: 804 - DNA, 20 bp, synthetic construct
  source 1..20: mol_type = other DNA
cttccagtgacctcagtact

SEQ ID NO: 805 - DNA, 20 bp, synthetic construct
  source 1..20: mol_type = other DNA
gcttccagtgacctcagtac

SEQ ID NO: 806 - DNA, 20 bp, synthetic construct
  source 1..20: mol_type = other DNA
ggcttccagtgacctcagta

SEQ ID NO: 807 - DNA, 20 bp, synthetic construct
  source 1..20: mol_type = other DNA
tggcttccagtgacctcagt

SEQ ID NO: 808 - DNA, 20 bp, synthetic construct
  source 1..20: mol_type = other DNA
gaagattccaccagtttcca

SEQ ID NO: 809 - DNA, 20 bp, synthetic construct
  source 1..20: mol_type = other DNA
tgaagattccaccagtttcc

SEQ ID NO: 810 - DNA, 20 bp, synthetic construct
  source 1..20: mol_type = other DNA
catgaagattccaccagttt

SEQ ID NO: 811 - DNA, 20 bp, synthetic construct
  source 1..20: mol_type = other DNA
ccatgaagattccaccagtt

SEQ ID NO: 812 - DNA, 20 bp, synthetic construct
  source 1..20: mol_type = other DNA
tccatgaagattccaccagt

SEQ ID NO: 813 - DNA, 20 bp, synthetic construct
  source 1..20: mol_type = other DNA
ttccatgaagattccaccag

SEQ ID NO: 814 - DNA, 20 bp, synthetic construct
  source 1..20: mol_type = other DNA
tcagatccttggtattagcc

SEQ ID NO: 815 - DNA, 16 bp, synthetic construct
  source 1..16: mol_type = other DNA
gatccttggtattagc

SEQ ID NO: 816 - DNA, 20 bp, synthetic construct
  source 1..20: mol_type = other DNA
gtcagatccttggtattagc

SEQ ID NO: 817 - DNA, 20 bp, synthetic construct
  source 1..20: mol_type = other DNA
tgtcagatccttggtattag

SEQ ID NO: 818 - DNA, 20 bp, synthetic construct
  source 1..20: mol_type = other DNA
tatgtcagatccttggtatt

SEQ ID NO: 819 - DNA, 20 bp, synthetic construct
  source 1..20: mol_type = other DNA
ctatgtcagatccttggtat

SEQ ID NO: 820 - DNA, 20 bp, synthetic construct
  source 1..20: mol_type = other DNA
tctatgtcagatccttggta

SEQ ID NO: 821 - DNA, 20 bp, synthetic construct
  source 1..20: mol_type = other DNA
gtctatgtcagatccttggt

SEQ ID NO: 822 - DNA, 20 bp, synthetic construct
  source 1..20: mol_type = other DNA
tgtctatgtcagatccttgg

SEQ ID NO: 823 - DNA, 16 bp, synthetic construct
  source 1..16: mol_type = other DNA
ctatgtcagatccttg

SEQ ID NO: 824 - DNA, 20 bp, synthetic construct
  source 1..20: mol_type = other DNA
ttgtctatgtcagatccttg

SEQ ID NO: 825 - DNA, 16 bp, synthetic construct
  source 1..16: mol_type = other DNA
gtctatgtcagatcct

SEQ ID NO: 826 - DNA, 20 bp, synthetic construct
  source 1..20: mol_type = other DNA
tttgttaagaccatctcagg

SEQ ID NO: 827 - DNA, 20 bp, synthetic construct
  source 1..20: mol_type = other DNA
caactgaactttgcctgcct

SEQ ID NO: 828 - DNA, 16 bp, synthetic construct
  source 1..16: mol_type = other DNA
taatgtagaagggtcc

SEQ ID NO: 829 - DNA, 16 bp, synthetic construct
  source 1..16: mol_type = other DNA
ttaggatcaacatggg

SEQ ID NO: 830 - DNA, 16 bp, synthetic construct
  source 1..16: mol_type = other DNA
ggcttgttaggatcaa

SEQ ID NO: 831 - DNA, 16 bp, synthetic construct
  source 1..16: mol_type = other DNA
gtgggacttggcttgt

SEQ ID NO: 832 - DNA, 20 bp, synthetic construct
  source 1..20: mol_type = other DNA
caatgtgggacttggcttgt

SEQ ID NO: 833 - DNA, 20 bp, synthetic construct
  source 1..20: mol_type = other DNA
gatgcaatgtgggacttggc

SEQ ID NO: 834 - DNA, 20 bp, synthetic construct
  source 1..20: mol_type = other DNA
tgatgcaatgtgggacttgg

SEQ ID NO: 835 - DNA, 20 bp, synthetic construct
  source 1..20: mol_type = other DNA
gatgatgcaatgtgggactt

SEQ ID NO: 836 - DNA, 20 bp, synthetic construct
  source 1..20: mol_type = other DNA
ggatgatgcaatgtgggact

SEQ ID NO: 837 - DNA, 20 bp, synthetic construct
  source 1..20: mol_type = other DNA
tgtgggatgatgcaatgtgg

SEQ ID NO: 838 - DNA, 20 bp, synthetic construct
  source 1..20: mol_type = other DNA
gagtttcacatcttgaagtt

SEQ ID NO: 839 - DNA, 20 bp, synthetic construct
  source 1..20: mol_type = other DNA
ggagtttcacatcttgaagt

SEQ ID NO: 840 - DNA, 20 bp, synthetic construct
  source 1..20: mol_type = other DNA
gaacccaatacaggagactc

SEQ ID NO: 841 - DNA, 20 bp, synthetic construct
  source 1..20: mol_type = other DNA
tgaacccaatacaggagact

SEQ ID NO: 842 - DNA, 20 bp, synthetic construct
  source 1..20: mol_type = other DNA
taatgaacccaatacaggag

SEQ ID NO: 843 - DNA, 20 bp, synthetic construct
  source 1..20: mol_type = other DNA
ttaatgaacccaatacagga

SEQ ID NO: 844 - DNA, 20 bp, synthetic construct
  source 1..20: mol_type = other DNA
tcattgtagcagaccagaaa

SEQ ID NO: 845 - DNA, 20 bp, synthetic construct
  source 1..20: mol_type = other DNA
gatcattgtagcagaccaga

SEQ ID NO: 846 - DNA, 16 bp, synthetic construct
  source 1..16: mol_type = other DNA
cattgtagcagaccag

SEQ ID NO: 847 - DNA, 16 bp, synthetic construct
  source 1..16: mol_type = other DNA
ggatcattgtagcaga

SEQ ID NO: 848 - DNA, 20 bp, synthetic construct
  source 1..20: mol_type = other DNA
tttgtgcctttggactatag

SEQ ID NO: 849 - DNA, 16 bp, synthetic construct
  source 1..16: mol_type = other DNA
gtgcctttggactata

SEQ ID NO: 850 - DNA, 20 bp, synthetic construct
  source 1..20: mol_type = other DNA
cattagtacaggtttaggtg

SEQ ID NO: 851 - DNA, 16 bp, synthetic construct
  source 1..16: mol_type = other DNA
tagtacaggtttaggt

SEQ ID NO: 852 - DNA, 20 bp, synthetic construct
  source 1..20: mol_type = other DNA
tacattagtacaggtttagg

SEQ ID NO: 853 - DNA, 16 bp, synthetic construct
  source 1..16: mol_type = other DNA
gcatctagtggtatat

SEQ ID NO: 854 - DNA, 16 bp, synthetic construct
  source 1..16: mol_type = other DNA
tgaagcatctagtggt

SEQ ID NO: 855 - DNA, 20 bp, synthetic construct
  source 1..20: mol_type = other DNA
tcccatactgaagcatctag

SEQ ID NO: 856 - DNA, 20 bp, synthetic construct
  source 1..20: mol_type = other DNA
ctcccatactgaagcatcta

SEQ ID NO: 857 - DNA, 20 bp, synthetic construct
  source 1..20: mol_type = other DNA
tctcccatactgaagcatct

SEQ ID NO: 858 - DNA, 16 bp, synthetic construct
  source 1..16: mol_type = other DNA
cccatactgaagcatc

SEQ ID NO: 859 - DNA, 20 bp, synthetic construct
  source 1..20: mol_type = other DNA
tatctcccatactgaagcat

SEQ ID NO: 860 - DNA, 20 bp, synthetic construct
  source 1..20: mol_type = other DNA
caatatctcccatactgaag

SEQ ID NO: 861 - DNA, 20 bp, synthetic construct
  source 1..20: mol_type = other DNA
tcaatatctcccatactgaa

SEQ ID NO: 862 - DNA, 20 bp, synthetic construct
  source 1..20: mol_type = other DNA
ttcaatatctcccatactga

SEQ ID NO: 863 - DNA, 20 bp, synthetic construct
  source 1..20: mol_type = other DNA
cagcacccttagaactttag

SEQ ID NO: 864 - DNA, 20 bp, synthetic construct
  source 1..20: mol_type = other DNA
cacagcacccttagaacttt

SEQ ID NO: 865 - DNA, 20 bp, synthetic construct
  source 1..20: mol_type = other DNA
ccacagcacccttagaactt

SEQ ID NO: 866 - DNA, 20 bp, synthetic construct
  source 1..20: mol_type = other DNA
caccacagcacccttagaac

SEQ ID NO: 867 - DNA, 20 bp, synthetic construct
  source 1..20: mol_type = other DNA
ccaccacagcacccttagaa

SEQ ID NO: 868 - DNA, 20 bp, synthetic construct
  source 1..20: mol_type = other DNA
tccaccacagcacccttaga

SEQ ID NO: 869 - DNA, 20 bp, synthetic construct
  source 1..20: mol_type = other DNA
ctccaccacagcacccttag

SEQ ID NO: 870 - DNA, 20 bp, synthetic construct
  source 1..20: mol_type = other DNA
catatctccaccacagcacc

SEQ ID NO: 871 - DNA, 20 bp, synthetic construct
  source 1..20: mol_type = other DNA
ccatatctccaccacagcac

SEQ ID NO: 872 - DNA, 20 bp, synthetic construct
  source 1..20: mol_type = other DNA
tccatatctccaccacagca

SEQ ID NO: 873 - DNA, 20 bp, synthetic construct
  source 1..20: mol_type = other DNA
tgtccatatctccaccacag

SEQ ID NO: 874 - DNA, 20 bp, synthetic construct
  source 1..20: mol_type = other DNA
catcctttctcataaccaga

SEQ ID NO: 875 - DNA, 16 bp, synthetic construct
  source 1..16: mol_type = other DNA
gggcatagttctcagt

SEQ ID NO: 876 - DNA, 20 bp, synthetic construct
  source 1..20: mol_type = other DNA
ttccagctacactcacttga

SEQ ID NO: 877 - DNA, 20 bp, synthetic construct
  source 1..20: mol_type = other DNA
gacatcttccagctacactc

SEQ ID NO: 878 - DNA, 20 bp, synthetic construct
  source 1..20: mol_type = other DNA
tgacatcttccagctacact

SEQ ID NO: 879 - DNA, 20 bp, synthetic construct
  source 1..20: mol_type = other DNA
taactagggttctgatgaca

SEQ ID NO: 880 - DNA, 16 bp, synthetic construct
  source 1..16: mol_type = other DNA
ctagggttctgatgac

SEQ ID NO: 881 - DNA, 20 bp, synthetic construct
  source 1..20: mol_type = other DNA
ttaactagggttctgatgac

SEQ ID NO: 882 - DNA, 20 bp, synthetic construct
  source 1..20: mol_type = other DNA
tattaactagggttctgatg

SEQ ID NO: 883 - DNA, 16 bp, synthetic construct
  source 1..16: mol_type = other DNA
taactagggttctgat

SEQ ID NO: 884 - DNA, 20 bp, synthetic construct
  source 1..20: mol_type = other DNA
gttattaactagggttctga

SEQ ID NO: 885 - DNA, 20 bp, synthetic construct
  source 1..20: mol_type = other DNA
tgttattaactagggttctg

SEQ ID NO: 886 - DNA, 20 bp, synthetic construct
  source 1..20: mol_type = other DNA
catgttattaactagggttc

SEQ ID NO: 887 - DNA, 20 bp, synthetic construct
  source 1..20: mol_type = other DNA
cacatgttattaactagggt

SEQ ID NO: 888 - DNA, 20 bp, synthetic construct
  source 1..20: mol_type = other DNA
gaccacatgttattaactag

SEQ ID NO: 889 - DNA, 20 bp, synthetic construct
  source 1..20: mol_type = other DNA
gtagaccacatgttattaac

SEQ ID NO: 890 - DNA, 16 bp, synthetic construct
  source 1..16: mol_type = other DNA
gtagcaatggtagacc

SEQ ID NO: 891 - DNA, 16 bp, synthetic construct
  source 1..16: mol_type = other DNA
tgtagcaatggtagac

SEQ ID NO: 892 - DNA, 16 bp, synthetic construct
  source 1..16: mol_type = other DNA
gagggcattgtattgt

SEQ ID NO: 893 - DNA, 20 bp, synthetic construct
  source 1..20: mol_type = other DNA
ctgtgaatgtaatttgagga

SEQ ID NO: 894 - DNA, 20 bp, synthetic construct
  source 1..20: mol_type = other DNA
tctgtgaatgtaatttgagg

SEQ ID NO: 895 - DNA, 20 bp, synthetic construct
  source 1..20: mol_type = other DNA
ttcatagagcatgggttgtt

SEQ ID NO: 896 - DNA, 20 bp, synthetic construct
  source 1..20: mol_type = other DNA
cttcatagagcatgggttgt

SEQ ID NO: 897 - DNA, 20 bp, synthetic construct
  source 1..20: mol_type = other DNA
ccttcatagagcatgggttg

SEQ ID NO: 898 - DNA, 20 bp, synthetic construct
  source 1..20: mol_type = other DNA
tccttcatagagcatgggtt

SEQ ID NO: 899 - DNA, 20 bp, synthetic construct
  source 1..20: mol_type = other DNA
ctccttcatagagcatgggt

SEQ ID NO: 900 - DNA, 20 bp, synthetic construct
  source 1..20: mol_type = other DNA
gactccttcatagagcatgg

SEQ ID NO: 901 - DNA, 16 bp, synthetic construct
  source 1..16: mol_type = other DNA
gactccttcatagagc

SEQ ID NO: 902 - DNA, 20 bp, synthetic construct
  source 1..20: mol_type = other DNA
cattgggaaggatagtatgc

SEQ ID NO: 903 - DNA, 20 bp, synthetic construct
  source 1..20: mol_type = other DNA
tcattgggaaggatagtatg

SEQ ID NO: 904 - DNA, 20 bp, synthetic construct
  source 1..20: mol_type = other DNA
gaactgtcacatctccctca

SEQ ID NO: 905 - DNA, 20 bp, synthetic construct
  source 1..20: mol_type = other DNA
gaatcctgaactgtcacatc

SEQ ID NO: 906 - DNA, 20 bp, synthetic construct
  source 1..20: mol_type = other DNA
tgaatcctgaactgtcacat

SEQ ID NO: 907 - DNA, 20 bp, synthetic construct
  source 1..20: mol_type = other DNA
ctgaatcctgaactgtcaca

SEQ ID NO: 908 - DNA, 20 bp, synthetic construct
  source 1..20: mol_type = other DNA
cctgaatcctgaactgtcac

SEQ ID NO: 909 - DNA, 20 bp, synthetic construct
  source 1..20: mol_type = other DNA
tcctgaatcctgaactgtca

SEQ ID NO: 910 - DNA, 20 bp, synthetic construct
  source 1..20: mol_type = other DNA
ttcctgaatcctgaactgtc

SEQ ID NO: 911 - DNA, 20 bp, synthetic construct
  source 1..20: mol_type = other DNA
tttcctgaatcctgaactgt

SEQ ID NO: 912 - DNA, 20 bp, synthetic construct
  source 1..20: mol_type = other DNA
ctttcctgaatcctgaactg

SEQ ID NO: 913 - DNA, 20 bp, synthetic construct
  source 1..20: mol_type = other DNA
gtcctttcctgaatcctgaa

SEQ ID NO: 914 - DNA, 20 bp, synthetic construct
  source 1..20: mol_type = other DNA
ggtcctttcctgaatcctga

SEQ ID NO: 915 - DNA, 20 bp, synthetic construct
  source 1..20: mol_type = other DNA
ccatcctaaagcacacttgc

SEQ ID NO: 916 - DNA, 20 bp, synthetic construct
  source 1..20: mol_type = other DNA
tccatcctaaagcacacttg

SEQ ID NO: 917 - DNA, 20 bp, synthetic construct
  source 1..20: mol_type = other DNA
ctccatcctaaagcacactt

SEQ ID NO: 918 - DNA, 20 bp, synthetic construct
  source 1..20: mol_type = other DNA
cctccatcctaaagcacact

SEQ ID NO: 919 - DNA, 20 bp, synthetic construct
  source 1..20: mol_type = other DNA
ccctccatcctaaagcacac

SEQ ID NO: 920 - DNA, 20 bp, synthetic construct
  source 1..20: mol_type = other DNA
gccctccatcctaaagcaca

SEQ ID NO: 921 - DNA, 20 bp, synthetic construct
  source 1..20: mol_type = other DNA
tgccctccatcctaaagcac

SEQ ID NO: 922 - DNA, 20 bp, synthetic construct
  source 1..20: mol_type = other DNA
ctgccctccatcctaaagca

SEQ ID NO: 923 - DNA, 20 bp, synthetic construct
  source 1..20: mol_type = other DNA
gaaatctacactcctggcac

SEQ ID NO: 924 - DNA, 20 bp, synthetic construct
  source 1..20: mol_type = other DNA
tgaaatctacactcctggca

SEQ ID NO: 925 - DNA, 20 bp, synthetic construct
  source 1..20: mol_type = other DNA
gatgaaatctacactcctgg

SEQ ID NO: 926 - DNA, 20 bp, synthetic construct
  source 1..20: mol_type = other DNA
gcagccaacagatgaaatct

SEQ ID NO: 927 - DNA, 20 bp, synthetic construct
  source 1..20: mol_type = other DNA
tgcagccaacagatgaaatc

SEQ ID NO: 928 - DNA, 20 bp, synthetic construct
  source 1..20: mol_type = other DNA
ttgcagccaacagatgaaat

SEQ ID NO: 929 - DNA, 20 bp, synthetic construct
  source 1..20: mol_type = other DNA
tttgcagccaacagatgaaa

SEQ ID NO: 930 - DNA, 20 bp, synthetic construct
  source 1..20: mol_type = other DNA
cacatttgcagccaacagat

SEQ ID NO: 931 - DNA, 20 bp, synthetic construct
  source 1..20: mol_type = other DNA
gggaactggcacacatttgc

SEQ ID NO: 932 - DNA, 20 bp, synthetic construct
  source 1..20: mol_type = other DNA
tgggaactggcacacatttg

SEQ ID NO: 933 - DNA, 20 bp, synthetic construct
  source 1..20: mol_type = other DNA
ttgggaactggcacacattt

SEQ ID NO: 934 - DNA, 20 bp, synthetic construct
  source 1..20: mol_type = other DNA
cattgggaactggcacacat

SEQ ID NO: 935 - DNA, 20 bp, synthetic construct
  source 1..20: mol_type = other DNA
gaacagtagcattccattgg

SEQ ID NO: 936 - DNA, 20 bp, synthetic construct
  source 1..20: mol_type = other DNA
gagaacagtagcattccatt

SEQ ID NO: 937 - DNA, 20 bp, synthetic construct
  source 1..20: mol_type = other DNA
cagagaacagtagcattcca

SEQ ID NO: 938 - DNA, 20 bp, synthetic construct
  source 1..20: mol_type = other DNA
tcagagaacagtagcattcc

SEQ ID NO: 939 - DNA, 20 bp, synthetic construct
  source 1..20: mol_type = other DNA
gtcagagaacagtagcattc

SEQ ID NO: 940 - DNA, 20 bp, synthetic construct
  source 1..20: mol_type = other DNA
ggtcagagaacagtagcatt

SEQ ID NO: 941 - DNA, 20 bp, synthetic construct
  source 1..20: mol_type = other DNA
gttatgagttgagggcaggt

SEQ ID NO: 942 - DNA, 20 bp, synthetic construct
  source 1..20: mol_type = other DNA
tgttatgagttgagggcagg

SEQ ID NO: 943 - DNA, 20 bp, synthetic construct
  source 1..20: mol_type = other DNA
gtgttatgagttgagggcag

SEQ ID NO: 944 - DNA, 20 bp, synthetic construct
  source 1..20: mol_type = other DNA
tgtgttatgagttgagggca

SEQ ID NO: 945 - DNA, 16 bp, synthetic construct
  source 1..16: mol_type = other DNA
gttatgagttgagggc

SEQ ID NO: 946 - DNA, 20 bp, synthetic construct
  source 1..20: mol_type = other DNA
ttgtgttatgagttgagggc

SEQ ID NO: 947 - DNA, 20 bp, synthetic construct
  source 1..20: mol_type = other DNA
gtgaattgtgacttgtgtta

SEQ ID NO: 948 - DNA, 20 bp, synthetic construct
  source 1..20: mol_type = other DNA
cagtgaattgtgacttgtgt

SEQ ID NO: 949 - DNA, 20 bp, synthetic construct
  source 1..20: mol_type = other DNA
ccagtgaattgtgacttgtg

SEQ ID NO: 950 - DNA, 20 bp, synthetic construct
  source 1..20: mol_type = other DNA
tgaaactccagtgaattgtg

SEQ ID NO: 951 - DNA, 20 bp, synthetic construct
  source 1..20: mol_type = other DNA
gtgaaactccagtgaattgt

SEQ ID NO: 952 - DNA, 20 bp, synthetic construct
  source 1..20: mol_type = other DNA
tgtgaaactccagtgaattg

SEQ ID NO: 953 - DNA, 20 bp, synthetic construct
  source 1..20: mol_type = other DNA
ctgtgaaactccagtgaatt

SEQ ID NO: 954 - DNA, 20 bp, synthetic construct
  source 1..20: mol_type = other DNA
tctgattccaaacatccaca

SEQ ID NO: 955 - DNA, 20 bp, synthetic construct
  source 1..20: mol_type = other DNA
ttctgattccaaacatccac

SEQ ID NO: 956 - DNA, 20 bp, synthetic construct
  source 1..20: mol_type = other DNA
tttctgattccaaacatcca

SEQ ID NO: 957 - DNA, 20 bp, synthetic construct
  source 1..20: mol_type = other DNA
catttctgattccaaacatc

SEQ ID NO: 958 - DNA, 20 bp, synthetic construct
  source 1..20: mol_type = other DNA
gcatttctgattccaaacat

SEQ ID NO: 959 - DNA, 20 bp, synthetic construct
  source 1..20: mol_type = other DNA
tgcatttctgattccaaaca

SEQ ID NO: 960 - DNA, 20 bp, synthetic construct
  source 1..20: mol_type = other DNA
ctgcatttctgattccaaac

SEQ ID NO: 961 - DNA, 20 bp, synthetic construct
  source 1..20: mol_type = other DNA
tctgcatttctgattccaaa

SEQ ID NO: 962 - DNA, 20 bp, synthetic construct
  source 1..20: mol_type = other DNA
gtctgcatttctgattccaa

SEQ ID NO: 963 - DNA, 20 bp, synthetic construct
  source 1..20: mol_type = other DNA
gtgagtctgcatttctgatt

SEQ ID NO: 964 - DNA, 20 bp, synthetic construct
  source 1..20: mol_type = other DNA
tgtgagtctgcatttctgat

SEQ ID NO: 965 - DNA, 20 bp, synthetic construct
  source 1..20: mol_type = other DNA
ctctttaaatcctatacagc

SEQ ID NO: 966 - DNA, 20 bp, synthetic construct
  source 1..20: mol_type = other DNA
ccaaattagtaagtcttcag

SEQ ID NO: 967 - DNA, 20 bp, synthetic construct
  source 1..20: mol_type = other DNA
gccaaattagtaagtcttca

SEQ ID NO: 968 - DNA, 20 bp, synthetic construct
  source 1..20: mol_type = other DNA
ctaaactgccatgcaaccct

SEQ ID NO: 969 - DNA, 20 bp, synthetic construct
  source 1..20: mol_type = other DNA
gctaaactgccatgcaaccc

SEQ ID NO: 970 - DNA, 20 bp, synthetic construct
  source 1..20: mol_type = other DNA
ctctgctaaactgccatgca

SEQ ID NO: 971 - DNA, 20 bp, synthetic construct
  source 1..20: mol_type = other DNA
tactctgctaaactgccatg

SEQ ID NO: 972 - DNA, 20 bp, synthetic construct
  source 1..20: mol_type = other DNA
ctactctgctaaactgccat

SEQ ID NO: 973 - DNA, 20 bp, synthetic construct
  source 1..20: mol_type = other DNA
ttaactactctgctaaactg

SEQ ID NO: 974 - DNA, 20 bp, synthetic construct
  source 1..20: mol_type = other DNA
gtttaactactctgctaaac

SEQ ID NO: 975 - DNA, 20 bp, synthetic construct
  source 1..20: mol_type = other DNA
caagcccatttgtttaacta

SEQ ID NO: 976 - DNA, 20 bp, synthetic construct
  source 1..20: mol_type = other DNA
tcaagcccatttgtttaact

SEQ ID NO: 977 - DNA, 20 bp, synthetic construct
  source 1..20: mol_type = other DNA
tgagtttcaagcccatttgt

SEQ ID NO: 978 - DNA, 20 bp, synthetic construct
  source 1..20: mol_type = other DNA
cacaatttaagattctcagg

SEQ ID NO: 979 - DNA, 20 bp, synthetic construct
  source 1..20: mol_type = other DNA
gcacacaatttaagattctc

SEQ ID NO: 980 - DNA, 20 bp, synthetic construct
  source 1..20: mol_type = other DNA
ggcacacaatttaagattct

SEQ ID NO: 981 - DNA, 20 bp, synthetic construct
  source 1..20: mol_type = other DNA
ctaaggcacacaatttaaga

SEQ ID NO: 982 - DNA, 20 bp, synthetic construct
  source 1..20: mol_type = other DNA
cctaaggcacacaatttaag

SEQ ID NO: 983 - DNA, 20 bp, synthetic construct
  source 1..20: mol_type = other DNA
tcttacaaataacctctgag

SEQ ID NO: 984 - DNA, 20 bp, synthetic construct
  source 1..20: mol_type = other DNA
gacttggctttgcatgatag

SEQ ID NO: 985 - DNA, 20 bp, synthetic construct
  source 1..20: mol_type = other DNA
cagaagacttggctttgcat

SEQ ID NO: 986 - DNA, 20 bp, synthetic construct
  source 1..20: mol_type = other DNA
tcagaagacttggctttgca

SEQ ID NO: 987 - DNA, 20 bp, synthetic construct
  source 1..20: mol_type = other DNA
tatttaaaggagggatcatg

SEQ ID NO: 988 - DNA, 20 bp, synthetic construct
  source 1..20: mol_type = other DNA
ctatttaaaggagggatcat

SEQ ID NO: 989 - DNA, 20 bp, synthetic construct
  source 1..20: mol_type = other DNA
tctatttaaaggagggatca

SEQ ID NO: 990 - DNA, 20 bp, synthetic construct
  source 1..20: mol_type = other DNA
gaatgtctctgtaagttcat

SEQ ID NO: 991 - DNA, 20 bp, synthetic construct
  source 1..20: mol_type = other DNA
tagaatgtctctgtaagttc

SEQ ID NO: 992 - DNA, 20 bp, synthetic construct
  source 1..20: mol_type = other DNA
gtacacatagaatgtctctg

SEQ ID NO: 993 - DNA, 20 bp, synthetic construct
  source 1..20: mol_type = other DNA
ggtacacatagaatgtctct

SEQ ID NO: 994 - DNA, 20 bp, synthetic construct
  source 1..20: mol_type = other DNA
tggtacacatagaatgtctc

SEQ ID NO: 995 - DNA, 20 bp, synthetic construct
  source 1..20: mol_type = other DNA
ttggtacacatagaatgtct

SEQ ID NO: 996 - DNA, 20 bp, synthetic construct
  source 1..20: mol_type = other DNA
gttggtacacatagaatgtc

SEQ ID NO: 997 - DNA, 20 bp, synthetic construct
  source 1..20: mol_type = other DNA
ggttggtacacatagaatgt

SEQ ID NO: 998 - DNA, 20 bp, synthetic construct
  source 1..20: mol_type = other DNA
gggttggtacacatagaatg

SEQ ID NO: 999 - DNA, 20 bp, synthetic construct
  source 1..20: mol_type = other DNA
tgggttggtacacatagaat

SEQ ID NO: 1000 - DNA, 20 bp, synthetic construct
  source 1..20: mol_type = other DNA
ttgggttggtacacatagaa

SEQ ID NO: 1001 - DNA, 16 bp, synthetic construct
  source 1..16: mol_type = other DNA
ggttggtacacataga

SEQ ID NO: 1002 - DNA, 20 bp, synthetic construct
  source 1..20: mol_type = other DNA
gttgggttggtacacataga

SEQ ID NO: 1003 - DNA, 16 bp, synthetic construct
  source 1..16: mol_type = other DNA
gggttggtacacatag

SEQ ID NO: 1004 - DNA, 20 bp, synthetic construct
  source 1..20: mol_type = other DNA
tgttgggttggtacacatag

SEQ ID NO: 1005 - DNA, 16 bp, synthetic construct
  source 1..16: mol_type = other DNA
gttgggttggtacaca

SEQ ID NO: 1006 - DNA, 16 bp, synthetic construct
  source 1..16: mol_type = other DNA
tgttgggttggtacac

SEQ ID NO: 1007 - DNA, 16 bp, synthetic construct
  source 1..16: mol_type = other DNA
gtgttgggttggtaca

SEQ ID NO: 1008 - DNA, 20 bp, synthetic construct
  source 1..20: mol_type = other DNA
tatagtgttgggttggtaca

SEQ ID NO: 1009 - DNA, 20 bp, synthetic construct
  source 1..20: mol_type = other DNA
ctatagtgttgggttggtac

SEQ ID NO: 1010 - DNA, 16 bp, synthetic construct
  source 1..16: mol_type = other DNA
tatagtgttgggttgg

SEQ ID NO: 1011 - DNA, 16 bp, synthetic construct
  source 1..16: mol_type = other DNA
ctatagtgttgggttg

SEQ ID NO: 1012 - DNA, 20 bp, synthetic construct
  source 1..20: mol_type = other DNA
gatgctcaaatgatagttgt

SEQ ID NO: 1013 - DNA, 20 bp, synthetic construct
  source 1..20: mol_type = other DNA
catagatgctcaaatgatag

SEQ ID NO: 1014 - DNA, 20 bp, synthetic construct
  source 1..20: mol_type = other DNA
gtacatagatgctcaaatga

SEQ ID NO: 1015 - DNA, 20 bp, synthetic construct
  source 1..20: mol_type = other DNA
ggtacatagatgctcaaatg

SEQ ID NO: 1016 - DNA, 20 bp, synthetic construct
  source 1..20: mol_type = other DNA
tggtacatagatgctcaaat

SEQ ID NO: 1017 - DNA, 20 bp, synthetic construct
  source 1..20: mol_type = other DNA
tggttacatcagcaccctgg

SEQ ID NO: 1018 - DNA, 20 bp, synthetic construct
  source 1..20: mol_type = other DNA
cactcagcatggttacatca

SEQ ID NO: 1019 - DNA, 20 bp, synthetic construct
  source 1..20: mol_type = other DNA
cagcactcagcatggttaca

SEQ ID NO: 1020 - DNA, 20 bp, synthetic construct
  source 1..20: mol_type = other DNA
gtacctcagcactcagcatg

SEQ ID NO: 1021 - DNA, 16 bp, synthetic construct
  source 1..16: mol_type = other DNA
tcagcatgagtacctc

SEQ ID NO: 1022 - DNA, 20 bp, synthetic construct
  source 1..20: mol_type = other DNA
cataggcacaatcttctctc

SEQ ID NO: 1023 - DNA, 20 bp, synthetic construct
  source 1..20: mol_type = other DNA
ccataggcacaatcttctct

SEQ ID NO: 1024 - DNA, 20 bp, synthetic construct
  source 1..20: mol_type = other DNA
taccataggcacaatcttct

SEQ ID NO: 1025 - DNA, 20 bp, synthetic construct
  source 1..20: mol_type = other DNA
ctaccataggcacaatcttc

SEQ ID NO: 1026 - DNA, 20 bp, synthetic construct
  source 1..20: mol_type = other DNA
ctcattcctggctaccatag

SEQ ID NO: 1027 - DNA, 20 bp, synthetic construct
  source 1..20: mol_type = other DNA
caagaactttctatctcatc

SEQ ID NO: 1028 - DNA, 20 bp, synthetic construct
  source 1..20: mol_type = other DNA
ctgcctcttgcctaaattag

SEQ ID NO: 1029 - DNA, 20 bp, synthetic construct
  source 1..20: mol_type = other DNA
gctgcctcttgcctaaatta

SEQ ID NO: 1030 - DNA, 20 bp, synthetic construct
  source 1..20: mol_type = other DNA
ctccaaggtaattcaggacc

SEQ ID NO: 1031 - DNA, 20 bp, synthetic construct
  source 1..20: mol_type = other DNA
tctccaaggtaattcaggac

SEQ ID NO: 1032 - DNA, 20 bp, synthetic construct
  source 1..20: mol_type = other DNA
ttctccaaggtaattcagga

SEQ ID NO: 1033 - DNA, 20 bp, synthetic construct
  source 1..20: mol_type = other DNA
tttctccaaggtaattcagg

SEQ ID NO: 1034 - DNA, 20 bp, synthetic construct
  source 1..20: mol_type = other DNA
gtaagtctcatgttcctacc

SEQ ID NO: 1035 - DNA, 20 bp, synthetic construct
  source 1..20: mol_type = other DNA
ggtaagtctcatgttcctac

SEQ ID NO: 1036 - DNA, 16 bp, synthetic construct
  source 1..16: mol_type = other DNA
gtcaagggtaagtctc

SEQ ID NO: 1037 - DNA, 20 bp, synthetic construct
  source 1..20: mol_type = other DNA
catgtgtcaagggtaagtct

SEQ ID NO: 1038 - DNA, 20 bp, synthetic construct
  source 1..20: mol_type = other DNA
tcatgtgtcaagggtaagtc

SEQ ID NO: 1039 - DNA, 20 bp, synthetic construct
  source 1..20: mol_type = other DNA
taatcatgtgtcaagggtaa

SEQ ID NO: 1040 - DNA, 20 bp, synthetic construct
  source 1..20: mol_type = other DNA
taataatcatgtgtcaaggg

SEQ ID NO: 1041 - DNA, 20 bp, synthetic construct
  source 1..20: mol_type = other DNA
ttgcttgtcagaaacacaaa

SEQ ID NO: 1042 - DNA, 20 bp, synthetic construct
  source 1..20: mol_type = other DNA
caaattgcttgtcagaaaca

SEQ ID NO: 1043 - DNA, 20 bp, synthetic construct
  source 1..20: mol_type = other DNA
catttggcaattctggaggc

SEQ ID NO: 1044 - DNA, 20 bp, synthetic construct
  source 1..20: mol_type = other DNA
tcatttggcaattctggagg

SEQ ID NO: 1045 - DNA, 20 bp, synthetic construct
  source 1..20: mol_type = other DNA
gactcatttggcaattctgg

SEQ ID NO: 1046 - DNA, 20 bp, synthetic construct
  source 1..20: mol_type = other DNA
cagactcatttggcaattct

SEQ ID NO: 1047 - DNA, 20 bp, synthetic construct
  source 1..20: mol_type = other DNA
gtaacaaccagactcatttg

SEQ ID NO: 1048 - DNA, 20 bp, synthetic construct
  source 1..20: mol_type = other DNA
gcagatgttaccttgagtct

SEQ ID NO: 1049 - DNA, 20 bp, synthetic construct
  source 1..20: mol_type = other DNA
cactagcaataagcagatgt

SEQ ID NO: 1050 - DNA, 16 bp, synthetic construct
  source 1..16: mol_type = other DNA
cctggtctatgcacta

SEQ ID NO: 1051 - DNA, 20 bp, synthetic construct
  source 1..20: mol_type = other DNA
tctgggtctacttgcaattt

SEQ ID NO: 1052 - DNA, 16 bp, synthetic construct
  source 1..16: mol_type = other DNA
gggtctacttgcaatt

SEQ ID NO: 1053 - DNA, 20 bp, synthetic construct
  source 1..20: mol_type = other DNA
ttctgggtctacttgcaatt

SEQ ID NO: 1054 - DNA, 16 bp, synthetic construct
  source 1..16: mol_type = other DNA
tgggtctacttgcaat

SEQ ID NO: 1055 - DNA, 20 bp, synthetic construct
  source 1..20: mol_type = other DNA
taattctgggtctacttgca

SEQ ID NO: 1056 - DNA, 20 bp, synthetic construct
  source 1..20: mol_type = other DNA
taaacagttcctatttctgc

SEQ ID NO: 1057 - DNA, 20 bp, synthetic construct
  source 1..20: mol_type = other DNA
ctaaacagttcctatttctg

SEQ ID NO: 1058 - DNA, 20 bp, synthetic construct
  source 1..20: mol_type = other DNA
gctaaacagttcctatttct

SEQ ID NO: 1059 - DNA, 20 bp, synthetic construct
  source 1..20: mol_type = other DNA
ggctaaacagttcctatttc

SEQ ID NO: 1060 - DNA, 16 bp, synthetic construct
  source 1..16: mol_type = other DNA
ggctaaacagttccta

SEQ ID NO: 1061 - DNA, 20 bp, synthetic construct
  source 1..20: mol_type = other DNA
gttaccatctaagccagatc

SEQ ID NO: 1062 - DNA, 20 bp, synthetic construct
  source 1..20: mol_type = other DNA
tgttaccatctaagccagat

SEQ ID NO: 1063 - DNA, 20 bp, synthetic construct
  source 1..20: mol_type = other DNA
ttgttaccatctaagccaga

SEQ ID NO: 1064 - DNA, 20 bp, synthetic construct
  source 1..20: mol_type = other DNA
tttgttaccatctaagccag

SEQ ID NO: 1065 - DNA, 20 bp, synthetic construct
  source 1..20: mol_type = other DNA
ctttgttaccatctaagcca

SEQ ID NO: 1066 - DNA, 20 bp, synthetic construct
  source 1..20: mol_type = other DNA
cactttgttaccatctaagc

SEQ ID NO: 1067 - DNA, 20 bp, synthetic construct
  source 1..20: mol_type = other DNA
tcactttgttaccatctaag

SEQ ID NO: 1068 - DNA, 20 bp, synthetic construct
  source 1..20: mol_type = other DNA
ctgatggacagctacaatcc

SEQ ID NO: 1069 - DNA, 20 bp, synthetic construct
  source 1..20: mol_type = other DNA
cagcagtttcatccagtgtg

SEQ ID NO: 1070 - DNA, 20 bp, synthetic construct
  source 1..20: mol_type = other DNA
tcagcagtttcatccagtgt

SEQ ID NO: 1071 - DNA, 20 bp, synthetic construct
  source 1..20: mol_type = other DNA
ttcagcagtttcatccagtg

SEQ ID NO: 1072 - DNA, 20 bp, synthetic construct
  source 1..20: mol_type = other DNA
cttcagcagtttcatccagt

SEQ ID NO: 1073 - DNA, 20 bp, synthetic construct
  source 1..20: mol_type = other DNA
ccttcagcagtttcatccag

SEQ ID NO: 1074 - DNA, 20 bp, synthetic construct
  source 1..20: mol_type = other DNA
gcctttagcaccacagcctg

SEQ ID NO: 1075 - DNA, 20 bp, synthetic construct
  source 1..20: mol_type = other DNA
tgcctttagcaccacagcct

SEQ ID NO: 1076 - DNA, 20 bp, synthetic construct
  source 1..20: mol_type = other DNA
gtacagaatcttaatgggcc

SEQ ID NO: 1077 - DNA, 20 bp, synthetic construct
  source 1..20: mol_type = other DNA
ggtacagaatcttaatgggc

SEQ ID NO: 1078 - DNA, 20 bp, synthetic construct
  source 1..20: mol_type = other DNA
taggtacagaatcttaatgg

SEQ ID NO: 1079 - DNA, 20 bp, synthetic construct
  source 1..20: mol_type = other DNA
ggtgggtagtgtttaggtac

SEQ ID NO: 1080 - DNA, 16 bp, synthetic construct
  source 1..16: mol_type = other DNA
ggtgggtagtgtttag

SEQ ID NO: 1081 - DNA, 20 bp, synthetic construct
  source 1..20: mol_type = other DNA
ctgaaagttgctaaccattt

SEQ ID NO: 1082 - DNA, 20 bp, synthetic construct
  source 1..20: mol_type = other DNA
tctgaaagttgctaaccatt

SEQ ID NO: 1083 - DNA, 20 bp, synthetic construct
  source 1..20: mol_type = other DNA
ttctgaaagttgctaaccat

SEQ ID NO: 1084 - DNA, 20 bp, synthetic construct
  source 1..20: mol_type = other DNA
tttctgaaagttgctaacca

SEQ ID NO: 1085 - DNA, 20 bp, synthetic construct
  source 1..20: mol_type = other DNA
gtttctgaaagttgctaacc

SEQ ID NO: 1086 - DNA, 20 bp, synthetic construct
  source 1..20: mol_type = other DNA
gtgaagcagagtttaatgtt

SEQ ID NO: 1087 - DNA, 20 bp, synthetic construct
  source 1..20: mol_type = other DNA
tgtgaagcagagtttaatgt

SEQ ID NO: 1088 - DNA, 20 bp, synthetic construct
  source 1..20: mol_type = other DNA
gtgctgaaagtttatggtcc

SEQ ID NO: 1089 - DNA, 20 bp, synthetic construct
  source 1..20: mol_type = other DNA
ggtgctgaaagtttatggtc

SEQ ID NO: 1090 - DNA, 20 bp, synthetic construct
  source 1..20: mol_type = other DNA
caaggtgctgaaagtttatg

SEQ ID NO: 1091 - DNA, 20 bp, synthetic construct
  source 1..20: mol_type = other DNA
tcaaggtgctgaaagtttat

SEQ ID NO: 1092 - DNA, 20 bp, synthetic construct
  source 1..20: mol_type = other DNA
ttcaaggtgctgaaagttta

SEQ ID NO: 1093 - DNA, 20 bp, synthetic construct
  source 1..20: mol_type = other DNA
gttcaaggtgctgaaagttt

SEQ ID NO: 1094 - DNA, 20 bp, synthetic construct
  source 1..20: mol_type = other DNA
tgttcaaggtgctgaaagtt

SEQ ID NO: 1095 - DNA, 20 bp, synthetic construct
  source 1..20: mol_type = other DNA
ttgttcaaggtgctgaaagt

SEQ ID NO: 1096 - DNA, 20 bp, synthetic construct
  source 1..20: mol_type = other DNA
tttgttcaaggtgctgaaag

SEQ ID NO: 1097 - DNA, 20 bp, synthetic construct
  source 1..20: mol_type = other DNA
ctgtagaagggattgaattg

SEQ ID NO: 1098 - DNA, 16 bp, synthetic construct
  source 1..16: mol_type = other DNA
ggtgaattacaggcta

SEQ ID NO: 1099 - DNA, 20 bp, synthetic construct
  source 1..20: mol_type = other DNA
tttagaaggtggtgaattac

SEQ ID NO: 1100 - DNA, 20 bp, synthetic construct
  source 1..20: mol_type = other DNA
ctaaatgtgagacctgagag

SEQ ID NO: 1101 - DNA, 20 bp, synthetic construct
  source 1..20: mol_type = other DNA
gctaaatgtgagacctgaga

SEQ ID NO: 1102 - DNA, 20 bp, synthetic construct
  source 1..20: mol_type = other DNA
tgctaaatgtgagacctgag

SEQ ID NO: 1103 - DNA, 20 bp, synthetic construct
  source 1..20: mol_type = other DNA
gatgctaaatgtgagacctg

SEQ ID NO: 1104 - DNA, 20 bp, synthetic construct
  source 1..20: mol_type = other DNA
ggatgctaaatgtgagacct

SEQ ID NO: 1105 - DNA, 20 bp, synthetic construct
  source 1..20: mol_type = other DNA
tggatgctaaatgtgagacc

SEQ ID NO: 1106 - DNA, 20 bp, synthetic construct
  source 1..20: mol_type = other DNA
ctggatgctaaatgtgagac

SEQ ID NO: 1107 - DNA, 20 bp, synthetic construct
  source 1..20: mol_type = other DNA
tctggatgctaaatgtgaga

SEQ ID NO: 1108 - DNA, 20 bp, synthetic construct
  source 1..20: mol_type = other DNA
ttaagtcctgagttgtctgg

SEQ ID NO: 1109 - DNA, 20 bp, synthetic construct
  source 1..20: mol_type = other DNA
cttaagtcctgagttgtctg

SEQ ID NO: 1110 - DNA, 20 bp, synthetic construct
  source 1..20: mol_type = other DNA
gtcattcccatacagaattt

SEQ ID NO: 1111 - DNA, 20 bp, synthetic construct
  source 1..20: mol_type = other DNA
tgtcattcccatacagaatt

SEQ ID NO: 1112 - DNA, 20 bp, synthetic construct
  source 1..20: mol_type = other DNA
cacatctttgctggtttgaa

SEQ ID NO: 1113 - DNA, 20 bp, synthetic construct
  source 1..20: mol_type = other DNA
cataattgctattcactacc

SEQ ID NO: 1114 - DNA, 20 bp, synthetic construct
  source 1..20: mol_type = other DNA
gccctcagaaccacaggtct

SEQ ID NO: 1115 - DNA, 20 bp, synthetic construct
  source 1..20: mol_type = other DNA
cagccctcagaaccacaggt

SEQ ID NO: 1116 - DNA, 20 bp, synthetic construct
  source 1..20: mol_type = other DNA
gacagccctcagaaccacag

SEQ ID NO: 1117 - DNA, 16 bp, synthetic construct
  source 1..16: mol_type = other DNA
gttgcaaaggtttagc

SEQ ID NO: 1118 - DNA, 20 bp, synthetic construct
  source 1..20: mol_type = other DNA
tcaggttgcaaaggtttagc

SEQ ID NO: 1119 - DNA, 20 bp, synthetic construct
  source 1..20: mol_type = other DNA
ctcaggttgcaaaggtttag

SEQ ID NO: 1120 - DNA, 20 bp, synthetic construct
  source 1..20: mol_type = other DNA
ggctcaggttgcaaaggttt

SEQ ID NO: 1121 - DNA, 20 bp, synthetic construct
  source 1..20: mol_type = other DNA
caacttaacttagagcatgg

SEQ ID NO: 1122 - DNA, 20 bp, synthetic construct
  source 1..20: mol_type = other DNA
ccaacttaacttagagcatg

SEQ ID NO: 1123 - DNA, 20 bp, synthetic construct
  source 1..20: mol_type = other DNA
gccaacttaacttagagcat

SEQ ID NO: 1124 - DNA, 20 bp, synthetic construct
  source 1..20: mol_type = other DNA
tgccaacttaacttagagca

SEQ ID NO: 1125 - DNA, 16 bp, synthetic construct
  source 1..16: mol_type = other DNA
caacttaacttagagc

SEQ ID NO: 1126 - DNA, 20 bp, synthetic construct
  source 1..20: mol_type = other DNA
ctgccaacttaacttagagc

SEQ ID NO: 1127 - DNA, 20 bp, synthetic construct
  source 1..20: mol_type = other DNA
gctgccaacttaacttagag

SEQ ID NO: 1128 - DNA, 16 bp, synthetic construct
  source 1..16: mol_type = other DNA
gccaacttaacttaga

SEQ ID NO: 1129 - DNA, 20 bp, synthetic construct
  source 1..20: mol_type = other DNA
tgctgccaacttaacttaga

SEQ ID NO: 1130 - DNA, 20 bp, synthetic construct
  source 1..20: mol_type = other DNA
catgctgccaacttaactta

SEQ ID NO: 1131 - DNA, 20 bp, synthetic construct
  source 1..20: mol_type = other DNA
ccatgctgccaacttaactt

SEQ ID NO: 1132 - DNA, 20 bp, synthetic construct
  source 1..20: mol_type = other DNA
gccatgctgccaacttaact

SEQ ID NO: 1133 - DNA, 20 bp, synthetic construct
  source 1..20: mol_type = other DNA
tgccatgctgccaacttaac

SEQ ID NO: 1134 - DNA, 20 bp, synthetic construct
  source 1..20: mol_type = other DNA
ctgccatgctgccaacttaa

SEQ ID NO: 1135 - DNA, 20 bp, synthetic construct
  source 1..20: mol_type = other DNA
gaatctgtgctctcaatctc

SEQ ID NO: 1136 - DNA, 20 bp, synthetic construct
  source 1..20: mol_type = other DNA
taatttgagcccatgcagtc

SEQ ID NO: 1137 - DNA, 20 bp, synthetic construct
  source 1..20: mol_type = other DNA
gtaatttgagcccatgcagt

SEQ ID NO: 1138 - DNA, 20 bp, synthetic construct
  source 1..20: mol_type = other DNA
ctgtaatttgagcccatgca

SEQ ID NO: 1139 - DNA, 20 bp, synthetic construct
  source 1..20: mol_type = other DNA
gtggtaaattatgaagctgt

SEQ ID NO: 1140 - DNA, 20 bp, synthetic construct
  source 1..20: mol_type = other DNA
tgtggtaaattatgaagctg

SEQ ID NO: 1141 - DNA, 20 bp, synthetic construct
  source 1..20: mol_type = other DNA
catgtggtaaattatgaagc

SEQ ID NO: 1142 - DNA, 20 bp, synthetic construct
  source 1..20: mol_type = other DNA
tatttcttactgtggattgc

SEQ ID NO: 1143 - DNA, 20 bp, synthetic construct
  source 1..20: mol_type = other DNA
catagaataggaccaatcaa

SEQ ID NO: 1144 - DNA, 16 bp, synthetic construct
  source 1..16: mol_type = other DNA
tagaataggaccaatc

SEQ ID NO: 1145 - DNA, 20 bp, synthetic construct
  source 1..20: mol_type = other DNA
tacatagaataggaccaatc

SEQ ID NO: 1146 - DNA, 16 bp, synthetic construct
  source 1..16: mol_type = other DNA
tggattatgactagca

SEQ ID NO: 1147 - DNA, 20 bp, synthetic construct
  source 1..20: mol_type = other DNA
caatttgctggattatgact

SEQ ID NO: 1148 - DNA, 20 bp, synthetic construct
  source 1..20: mol_type = other DNA
tcaatttgctggattatgac

SEQ ID NO: 1149 - DNA, 20 bp, synthetic construct
  source 1..20: mol_type = other DNA
catgaaatcaatttgctgga

SEQ ID NO: 1150 - DNA, 20 bp, synthetic construct
  source 1..20: mol_type = other DNA
gaccatgaaatcaatttgct

SEQ ID NO: 1151 - DNA, 20 bp, synthetic construct
  source 1..20: mol_type = other DNA
cattagtagaccatgaaatc

SEQ ID NO: 1152 - DNA, 20 bp, synthetic construct
  source 1..20: mol_type = other DNA
ccattagtagaccatgaaat

SEQ ID NO: 1153 - DNA, 16 bp, synthetic construct
  source 1..16: mol_type = other DNA
cattagtagaccatga

SEQ ID NO: 1154 - DNA, 20 bp, synthetic construct
  source 1..20: mol_type = other DNA
gaaaccattagtagaccatg

SEQ ID NO: 1155 - DNA, 20 bp, synthetic construct
  source 1..20: mol_type = other DNA
tgaaaccattagtagaccat

SEQ ID NO: 1156 - DNA, 20 bp, synthetic construct
  source 1..20: mol_type = other DNA
ctgaaaccattagtagacca

SEQ ID NO: 1157 - DNA, 20 bp, synthetic construct
  source 1..20: mol_type = other DNA
tctgaaaccattagtagacc

SEQ ID NO: 1158 - DNA, 20 bp, synthetic construct
  source 1..20: mol_type = other DNA
caaattgtgggtctgaaacc

SEQ ID NO: 1159 - DNA, 20 bp, synthetic construct
  source 1..20: mol_type = other DNA
tcaaattgtgggtctgaaac

SEQ ID NO: 1160 - DNA, 20 bp, synthetic construct
  source 1..20: mol_type = other DNA
ttcaaattgtgggtctgaaa

SEQ ID NO: 1161 - DNA, 20 bp, synthetic construct
  source 1..20: mol_type = other DNA
tttcaaattgtgggtctgaa

SEQ ID NO: 1162 - DNA, 20 bp, synthetic construct
  source 1..20: mol_type = other DNA
ccacagagaggatattattt

SEQ ID NO: 1163 - DNA, 20 bp, synthetic construct
  source 1..20: mol_type = other DNA
ttcataacaactccacagag

SEQ ID NO: 1164 - DNA, 20 bp, synthetic construct
  source 1..20: mol_type = other DNA
gtcatcttcataacaactcc

SEQ ID NO: 1165 - DNA, 20 bp, synthetic construct
  source 1..20: mol_type = other DNA
taccttccaagctaaacctt

SEQ ID NO: 1166 - DNA, 20 bp, synthetic construct
  source 1..20: mol_type = other DNA
ttaccttccaagctaaacct

SEQ ID NO: 1167 - DNA, 20 bp, synthetic construct
  source 1..20: mol_type = other DNA
tattaccttccaagctaaac

SEQ ID NO: 1168 - DNA, 20 bp, synthetic construct
  source 1..20: mol_type = other DNA
cttattaccttccaagctaa

SEQ ID NO: 1169 - DNA, 20 bp, synthetic construct
  source 1..20: mol_type = other DNA
gcacttattaccttccaagc

SEQ ID NO: 1170 - DNA, 20 bp, synthetic construct
  source 1..20: mol_type = other DNA
gagcacttattaccttccaa

SEQ ID NO: 1171 - DNA, 20 bp, synthetic construct
  source 1..20: mol_type = other DNA
tgagcacttattaccttcca

SEQ ID NO: 1172 - DNA, 20 bp, synthetic construct
  source 1..20: mol_type = other DNA
cactgagcacttattacctt

SEQ ID NO: 1173 - DNA, 20 bp, synthetic construct
  source 1..20: mol_type = other DNA
tcactgagcacttattacct

SEQ ID NO: 1174 - DNA, 20 bp, synthetic construct
  source 1..20: mol_type = other DNA
ttcactgagcacttattacc

SEQ ID NO: 1175 - DNA, 20 bp, synthetic construct
  source 1..20: mol_type = other DNA
cactaatattcactgagcac

SEQ ID NO: 1176 - DNA, 20 bp, synthetic construct
  source 1..20: mol_type = other DNA
cccttccttgagtaataata

SEQ ID NO: 1177 - DNA, 20 bp, synthetic construct
  source 1..20: mol_type = other DNA
gcccttccttgagtaataat

SEQ ID NO: 1178 - DNA, 20 bp, synthetic construct
  source 1..20: mol_type = other DNA
tgcccttccttgagtaataa

SEQ ID NO: 1179 - DNA, 20 bp, synthetic construct
  source 1..20: mol_type = other DNA
gatgcccttccttgagtaat

SEQ ID NO: 1180 - DNA, 20 bp, synthetic construct
  source 1..20: mol_type = other DNA
tgatgcccttccttgagtaa

SEQ ID NO: 1181 - DNA, 20 bp, synthetic construct
  source 1..20: mol_type = other DNA
ctgatgcccttccttgagta

SEQ ID NO: 1182 - DNA, 20 bp, synthetic construct
  source 1..20: mol_type = other DNA
cactgatgcccttccttgag

SEQ ID NO: 1183 - DNA, 20 bp, synthetic construct
  source 1..20: mol_type = other DNA
gatttatttcacactgatgc

SEQ ID NO: 1184 - DNA, 20 bp, synthetic construct
  source 1..20: mol_type = other DNA
ggcatgattactgggagctt

SEQ ID NO: 1185 - DNA, 20 bp, synthetic construct
  source 1..20: mol_type = other DNA
gggcatgattactgggagct

SEQ ID NO: 1186 - DNA, 16 bp, synthetic construct
  source 1..16: mol_type = other DNA
catgattactgggagc

SEQ ID NO: 1187 - DNA, 16 bp, synthetic construct
  source 1..16: mol_type = other DNA
gggcatgattactggg

SEQ ID NO: 1188 - DNA, 20 bp, synthetic construct
  source 1..20: mol_type = other DNA
tgaagggcatgattactggg

SEQ ID NO: 1189 - DNA, 20 bp, synthetic construct
  source 1..20: mol_type = other DNA
cttaaattctgacttgcttg

SEQ ID NO: 1190 - DNA, 20 bp, synthetic construct
  source 1..20: mol_type = other DNA
gcttaaattctgacttgctt

SEQ ID NO: 1191 - DNA, 20 bp, synthetic construct
  source 1..20: mol_type = other DNA
caagcaccatgtcttcactg

SEQ ID NO: 1192 - DNA, 20 bp, synthetic construct
  source 1..20: mol_type = other DNA
gcaagcaccatgtcttcact

SEQ ID NO: 1193 - DNA, 20 bp, synthetic construct
  source 1..20: mol_type = other DNA
cagcaactcagtaataccaa

SEQ ID NO: 1194 - DNA, 20 bp, synthetic construct
  source 1..20: mol_type = other DNA
tcagcaactcagtaatacca

SEQ ID NO: 1195 - DNA, 20 bp, synthetic construct
  source 1..20: mol_type = other DNA
ttcagcaactcagtaatacc

SEQ ID NO: 1196 - DNA, 20 bp, synthetic construct
  source 1..20: mol_type = other DNA
gttcagcaactcagtaatac

SEQ ID NO: 1197 - DNA, 20 bp, synthetic construct
  source 1..20: mol_type = other DNA
ggttcagcaactcagtaata

SEQ ID NO: 1198 - DNA, 20 bp, synthetic construct
  source 1..20: mol_type = other DNA
tggttcagcaactcagtaat

SEQ ID NO: 1199 - DNA, 20 bp, synthetic construct
  source 1..20: mol_type = other DNA
ttggttcagcaactcagtaa

SEQ ID NO: 1200 - DNA, 20 bp, synthetic construct
  source 1..20: mol_type = other DNA
ctgtaggaggtaatgagctg

SEQ ID NO: 1201 - DNA, 20 bp, synthetic construct
  source 1..20: mol_type = other DNA
cactgtaggaggtaatgagc

SEQ ID NO: 1202 - DNA, 20 bp, synthetic construct
  source 1..20: mol_type = other DNA
ggtggtttagggaatgctga

SEQ ID NO: 1203 - DNA, 20 bp, synthetic construct
  source 1..20: mol_type = other DNA
tggtggtttagggaatgctg

SEQ ID NO: 1204 - DNA, 20 bp, synthetic construct
  source 1..20: mol_type = other DNA
gtggtggtttagggaatgct

SEQ ID NO: 1205 - DNA, 20 bp, synthetic construct
  source 1..20: mol_type = other DNA
tagtggtggtttagggaatg

SEQ ID NO: 1206 - DNA, 20 bp, synthetic construct
  source 1..20: mol_type = other DNA
taatagtggtggtttaggga

SEQ ID NO: 1207 - DNA, 20 bp, synthetic construct
  source 1..20: mol_type = other DNA
ttaatagtggtggtttaggg

SEQ ID NO: 1208 - DNA, 20 bp, synthetic construct
  source 1..20: mol_type = other DNA
gagtcccaaatttaatagtg

SEQ ID NO: 1209 - DNA, 20 bp, synthetic construct
  source 1..20: mol_type = other DNA
cagagtcccaaatttaatag

SEQ ID NO: 1210 - DNA, 20 bp, synthetic construct
  source 1..20: mol_type = other DNA
gtttcagagtcccaaattta

SEQ ID NO: 1211 - DNA, 20 bp, synthetic construct
  source 1..20: mol_type = other DNA
gggtatttctgtggtttcag

SEQ ID NO: 1212 - DNA, 20 bp, synthetic construct
  source 1..20: mol_type = other DNA
tagggtatttctgtggtttc

SEQ ID NO: 1213 - DNA, 20 bp, synthetic construct
  source 1..20: mol_type = other DNA
gtagggtatttctgtggttt

SEQ ID NO: 1214 - DNA, 20 bp, synthetic construct
  source 1..20: mol_type = other DNA
tgtagggtatttctgtggtt

SEQ ID NO: 1215 - DNA, 20 bp, synthetic construct
  source 1..20: mol_type = other DNA
tcagtatttgaggaaatcag

SEQ ID NO: 1216 - DNA, 20 bp, synthetic construct
  source 1..20: mol_type = other DNA
gtcagtatttgaggaaatca

SEQ ID NO: 1217 - DNA, 20 bp, synthetic construct
  source 1..20: mol_type = other DNA
tgtcagtatttgaggaaatc

SEQ ID NO: 1218 - DNA, 20 bp, synthetic construct
  source 1..20: mol_type = other DNA
ctctccattgtttaggttaa

SEQ ID NO: 1219 - DNA, 20 bp, synthetic construct
  source 1..20: mol_type = other DNA
ttcttatctaccaagtgctg

SEQ ID NO: 1220 - DNA, 20 bp, synthetic construct
  source 1..20: mol_type = other DNA
gcatcactgaagaatttgta

SEQ ID NO: 1221 - DNA, 20 bp, synthetic construct
  source 1..20: mol_type = other DNA
caagcatcactgaagaattt

SEQ ID NO: 1222 - DNA, 20 bp, synthetic construct
  source 1..20: mol_type = other DNA
ccaagcatcactgaagaatt

SEQ ID NO: 1223 - DNA, 20 bp, synthetic construct
  source 1..20: mol_type = other DNA
gccaagcatcactgaagaat

SEQ ID NO: 1224 - DNA, 20 bp, synthetic construct
  source 1..20: mol_type = other DNA
gagccaagcatcactgaaga

SEQ ID NO: 1225 - DNA, 20 bp, synthetic construct
  source 1..20: mol_type = other DNA
tgcaaagtcagccagccagc

SEQ ID NO: 1226 - DNA, 20 bp, synthetic construct
  source 1..20: mol_type = other DNA
ttgcaaagtcagccagccag

SEQ ID NO: 1227 - DNA, 20 bp, synthetic construct
  source 1..20: mol_type = other DNA
tagaagtagttgcaaagtca

SEQ ID NO: 1228 - DNA, 20 bp, synthetic construct
  source 1..20: mol_type = other DNA
ctagaagtagttgcaaagtc

SEQ ID NO: 1229 - DNA, 20 bp, synthetic construct
  source 1..20: mol_type = other DNA
gaacccttaactagaagtag

SEQ ID NO: 1230 - DNA, 16 bp, synthetic construct
  source 1..16: mol_type = other DNA
tggaacccttaactag

SEQ ID NO: 1231 - DNA, 20 bp, synthetic construct
  source 1..20: mol_type = other DNA
cctttggaacccttaactag

SEQ ID NO: 1232 - DNA, 20 bp, synthetic construct
  source 1..20: mol_type = other DNA
gccatcagataccactcatc

SEQ ID NO: 1233 - DNA, 20 bp, synthetic construct
  source 1..20: mol_type = other DNA
cagccatcagataccactca

SEQ ID NO: 1234 - DNA, 20 bp, synthetic construct
  source 1..20: mol_type = other DNA
ccagccatcagataccactc

SEQ ID NO: 1235 - DNA, 20 bp, synthetic construct
  source 1..20: mol_type = other DNA
gccaggaccagccatcagat

SEQ ID NO: 1236 - DNA, 20 bp, synthetic construct
  source 1..20: mol_type = other DNA
tgccaggaccagccatcaga

SEQ ID NO: 1237 - DNA, 20 bp, synthetic construct
  source 1..20: mol_type = other DNA
ggttcaagtcctaaactggc

SEQ ID NO: 1238 - DNA, 20 bp, synthetic construct
  source 1..20: mol_type = other DNA
ggattactctgactggaatc

SEQ ID NO: 1239 - DNA, 20 bp, synthetic construct
  source 1..20: mol_type = other DNA
tggattactctgactggaat

SEQ ID NO: 1240 - DNA, 20 bp, synthetic construct
  source 1..20: mol_type = other DNA
ttggattactctgactggaa

SEQ ID NO: 1241 - DNA, 20 bp, synthetic construct
  source 1..20: mol_type = other DNA
tttggattactctgactgga

SEQ ID NO: 1242 - DNA, 16 bp, synthetic construct
  source 1..16: mol_type = other DNA
ggattactctgactgg

SEQ ID NO: 1243 - DNA, 20 bp, synthetic construct
  source 1..20: mol_type = other DNA
gtttggattactctgactgg

SEQ ID NO: 1244 - DNA, 20 bp, synthetic construct
  source 1..20: mol_type = other DNA
taggtttggattactctgac

SEQ ID NO: 1245 - DNA, 20 bp, synthetic construct
  source 1..20: mol_type = other DNA
ctaggtttggattactctga

SEQ ID NO: 1246 - DNA, 20 bp, synthetic construct
  source 1..20: mol_type = other DNA
gactaggtttggattactct

SEQ ID NO: 1247 - DNA, 16 bp, synthetic construct
  source 1..16: mol_type = other DNA
taggtttggattactc

SEQ ID NO: 1248 - DNA, 16 bp, synthetic construct
  source 1..16: mol_type = other DNA
gactaggtttggatta

SEQ ID NO: 1249 - DNA, 20 bp, synthetic construct
  source 1..20: mol_type = other DNA
gcagccagaattactaagct

SEQ ID NO: 1250 - DNA, 20 bp, synthetic construct
  source 1..20: mol_type = other DNA
tatttggaaactggtgaggc

SEQ ID NO: 1251 - DNA, 20 bp, synthetic construct
  source 1..20: mol_type = other DNA
ttatttggaaactggtgagg

SEQ ID NO: 1252 - DNA, 20 bp, synthetic construct
  source 1..20: mol_type = other DNA
gaattcttctcctaaagtac

SEQ ID NO: 1253 - DNA, 20 bp, synthetic construct
  source 1..20: mol_type = other DNA
ctgaattcttctcctaaagt

SEQ ID NO: 1254 - DNA, 20 bp, synthetic construct
  source 1..20: mol_type = other DNA
cctgaattcttctcctaaag

SEQ ID NO: 1255 - DNA, 20 bp, synthetic construct
  source 1..20: mol_type = other DNA
gcctgaattcttctcctaaa

SEQ ID NO: 1256 - DNA, 20 bp, synthetic construct
  source 1..20: mol_type = other DNA
cctatcttagacccagcctg

SEQ ID NO: 1257 - DNA, 20 bp, synthetic construct
  source 1..20: mol_type = other DNA
gcctatcttagacccagcct

SEQ ID NO: 1258 - DNA, 16 bp, synthetic construct
  source 1..16: mol_type = other DNA
gcctatcttagaccca

SEQ ID NO: 1259 - DNA, 20 bp, synthetic construct
  source 1..20: mol_type = other DNA
caacttaagacttccttatg

SEQ ID NO: 1260 - DNA, 20 bp, synthetic construct
  source 1..20: mol_type = other DNA
ccaacttaagacttccttat

SEQ ID NO: 1261 - DNA, 20 bp, synthetic construct
  source 1..20: mol_type = other DNA
ttatcaaatgcacccttagg

SEQ ID NO: 1262 - DNA, 20 bp, synthetic construct
  source 1..20: mol_type = other DNA
gttatcaaatgcacccttag

SEQ ID NO: 1263 - DNA, 20 bp, synthetic construct
  source 1..20: mol_type = other DNA
tgttatcaaatgcaccctta

SEQ ID NO: 1264 - DNA, 20 bp, synthetic construct
  source 1..20: mol_type = other DNA
ttgttatcaaatgcaccctt

SEQ ID NO: 1265 - DNA, 20 bp, synthetic construct
  source 1..20: mol_type = other DNA
gttgttatcaaatgcaccct

SEQ ID NO: 1266 - DNA, 16 bp, synthetic construct
  source 1..16: mol_type = other DNA
gttatcaaatgcaccc

SEQ ID NO: 1267 - DNA, 20 bp, synthetic construct
  source 1..20: mol_type = other DNA
tgttgttatcaaatgcaccc

SEQ ID NO: 1268 - DNA, 20 bp, synthetic construct
  source 1..20: mol_type = other DNA
ttgttgttatcaaatgcacc

SEQ ID NO: 1269 - DNA, 20 bp, synthetic construct
  source 1..20: mol_type = other DNA
ggtgcttgttaaatatttgc

SEQ ID NO: 1270 - DNA, 20 bp, synthetic construct
  source 1..20: mol_type = other DNA
ctgatagataataggtgctt

SEQ ID NO: 1271 - DNA, 20 bp, synthetic construct
  source 1..20: mol_type = other DNA
tagtgcctgatagataatag

SEQ ID NO: 1272 - DNA, 20 bp, synthetic construct
  source 1..20: mol_type = other DNA
gtagtgcctgatagataata

SEQ ID NO: 1273 - DNA, 20 bp, synthetic construct
  source 1..20: mol_type = other DNA
tgtagtgcctgatagataat

SEQ ID NO: 1274 - DNA, 20 bp, synthetic construct
  source 1..20: mol_type = other DNA
tatgtagtgcctgatagata

SEQ ID NO: 1275 - DNA, 16 bp, synthetic construct
  source 1..16: mol_type = other DNA
gtagtgcctgatagat

SEQ ID NO: 1276 - DNA, 16 bp, synthetic construct
  source 1..16: mol_type = other DNA
tgtagtgcctgataga

SEQ ID NO: 1277 - DNA, 20 bp, synthetic construct
  source 1..20: mol_type = other DNA
tatatgtagtgcctgataga

SEQ ID NO: 1278 - DNA, 20 bp, synthetic construct
  source 1..20: mol_type = other DNA
gtatatgtagtgcctgatag

SEQ ID NO: 1279 - DNA, 20 bp, synthetic construct
  source 1..20: mol_type = other DNA
tgtatatgtagtgcctgata

SEQ ID NO: 1280 - DNA, 20 bp, synthetic construct
  source 1..20: mol_type = other DNA
gaatgtatatgtagtgcctg

SEQ ID NO: 1281 - DNA, 20 bp, synthetic construct
  source 1..20: mol_type = other DNA
gagaatgtatatgtagtgcc

SEQ ID NO: 1282 - DNA, 20 bp, synthetic construct
  source 1..20: mol_type = other DNA
ggaaataattgctaggatac

SEQ ID NO: 1283 - DNA, 20 bp, synthetic construct
  source 1..20: mol_type = other DNA
catgactcctgcacaagaag

SEQ ID NO: 1284 - DNA, 20 bp, synthetic construct
  source 1..20: mol_type = other DNA
ttccactaaatagccaaggt

SEQ ID NO: 1285 - DNA, 20 bp, synthetic construct
  source 1..20: mol_type = other DNA
caaattccactaaatagcca

SEQ ID NO: 1286 - DNA, 20 bp, synthetic construct
  source 1..20: mol_type = other DNA
ccaaattccactaaatagcc

SEQ ID NO: 1287 - DNA, 20 bp, synthetic construct
  source 1..20: mol_type = other DNA
caccaaattccactaaatag

SEQ ID NO: 1288 - DNA, 20 bp, synthetic construct
  source 1..20: mol_type = other DNA
gaatcaccaaattccactaa

SEQ ID NO: 1289 - DNA, 20 bp, synthetic construct
  source 1..20: mol_type = other DNA
tgaatcaccaaattccacta

SEQ ID NO: 1290 - DNA, 20 bp, synthetic construct
  source 1..20: mol_type = other DNA
ctgaatcaccaaattccact

SEQ ID NO: 1291 - DNA, 20 bp, synthetic construct
  source 1..20: mol_type = other DNA
tctgaatcaccaaattccac

SEQ ID NO: 1292 - DNA, 20 bp, synthetic construct
  source 1..20: mol_type = other DNA
ttctgaatcaccaaattcca

SEQ ID NO: 1293 - DNA, 20 bp, synthetic construct
  source 1..20: mol_type = other DNA
gttctgaatcaccaaattcc

SEQ ID NO: 1294 - DNA, 20 bp, synthetic construct
  source 1..20: mol_type = other DNA
catgacaatcttggcttccc

SEQ ID NO: 1295 - DNA, 20 bp, synthetic construct
  source 1..20: mol_type = other DNA
gaacagctccatgacaatct

SEQ ID NO: 1296 - DNA, 20 bp, synthetic construct
  source 1..20: mol_type = other DNA
gacatttgtacttgagatag

SEQ ID NO: 1297 - DNA, 20 bp, synthetic construct
  source 1..20: mol_type = other DNA
ccactcaataagaacttagt

SEQ ID NO: 1298 - DNA, 20 bp, synthetic construct
  source 1..20: mol_type = other DNA
caccactcaataagaactta

SEQ ID NO: 1299 - DNA, 20 bp, synthetic construct
  source 1..20: mol_type = other DNA
ccaccactcaataagaactt

SEQ ID NO: 1300 - DNA, 20 bp, synthetic construct
  source 1..20: mol_type = other DNA
gccaccactcaataagaact

SEQ ID NO: 1301 - DNA, 20 bp, synthetic construct
  source 1..20: mol_type = other DNA
catgtcctgaaagccttcct

SEQ ID NO: 1302 - DNA, 20 bp, synthetic construct
  source 1..20: mol_type = other DNA
gcttaataatcaacacagac

SEQ ID NO: 1303 - DNA, 20 bp, synthetic construct
  source 1..20: mol_type = other DNA
cagcttaataatcaacacag

SEQ ID NO: 1304 - DNA, 20 bp, synthetic construct
  source 1..20: mol_type = other DNA
gcaacagcttaataatcaac

SEQ ID NO: 1305 - DNA, 20 bp, synthetic construct
  source 1..20: mol_type = other DNA
tggagtttacaggcaacagc

SEQ ID NO: 1306 - DNA, 20 bp, synthetic construct
  source 1..20: mol_type = other DNA
caaagctgaaatgtgattac

SEQ ID NO: 1307 - DNA, 20 bp, synthetic construct
  source 1..20: mol_type = other DNA
gcaaagctgaaatgtgatta

SEQ ID NO: 1308 - DNA, 20 bp, synthetic construct
  source 1..20: mol_type = other DNA
ggcaaagctgaaatgtgatt

SEQ ID NO: 1309 - DNA, 20 bp, synthetic construct
  source 1..20: mol_type = other DNA
tggcaaagctgaaatgtgat

SEQ ID NO: 1310 - DNA, 20 bp, synthetic construct
  source 1..20: mol_type = other DNA
ctggcaaagctgaaatgtga

SEQ ID NO: 1311 - DNA, 20 bp, synthetic construct
  source 1..20: mol_type = other DNA
tctggcaaagctgaaatgtg

SEQ ID NO: 1312 - DNA, 20 bp, synthetic construct
  source 1..20: mol_type = other DNA
ctctggcaaagctgaaatgt

SEQ ID NO: 1313 - DNA, 20 bp, synthetic construct
  source 1..20: mol_type = other DNA
cctctggcaaagctgaaatg

SEQ ID NO: 1314 - DNA, 20 bp, synthetic construct
  source 1..20: mol_type = other DNA
ccctctggcaaagctgaaat

SEQ ID NO: 1315 - DNA, 20 bp, synthetic construct
  source 1..20: mol_type = other DNA
tccctctggcaaagctgaaa

SEQ ID NO: 1316 - DNA, 20 bp, synthetic construct
  source 1..20: mol_type = other DNA
gaaatccctctggcaaagct

SEQ ID NO: 1317 - DNA, 20 bp, synthetic construct
  source 1..20: mol_type = other DNA
tgctgggatgatactgacag

SEQ ID NO: 1318 - DNA, 20 bp, synthetic construct
  source 1..20: mol_type = other DNA
ctgctgggatgatactgaca

SEQ ID NO: 1319 - DNA, 20 bp, synthetic construct
  source 1..20: mol_type = other DNA
gctgctgggatgatactgac

SEQ ID NO: 1320 - DNA, 20 bp, synthetic construct
  source 1..20: mol_type = other DNA
taactgcaaactggagctaa

SEQ ID NO: 1321 - DNA, 20 bp, synthetic construct
  source 1..20: mol_type = other DNA
gtgtgttcttgtagtgagga

SEQ ID NO: 1322 - DNA, 20 bp, synthetic construct
  source 1..20: mol_type = other DNA
gagtgtgttcttgtagtgag

SEQ ID NO: 1323 - DNA, 20 bp, synthetic construct
  source 1..20: mol_type = other DNA
ggagtgtgttcttgtagtga

SEQ ID NO: 1324 - DNA, 20 bp, synthetic construct
  source 1..20: mol_type = other DNA
gggagtgtgttcttgtagtg

SEQ ID NO: 1325 - DNA, 16 bp, synthetic construct
  source 1..16: mol_type = other DNA
gggactcaatatctgg

SEQ ID NO: 1326 - DNA, 20 bp, synthetic construct
  source 1..20: mol_type = other DNA
tataaggaattgaagcactg

SEQ ID NO: 1327 - DNA, 20 bp, synthetic construct
  source 1..20: mol_type = other DNA
cctcagaatattgctcaata

SEQ ID NO: 1328 - DNA, 20 bp, synthetic construct
  source 1..20: mol_type = other DNA
gcctcagaatattgctcaat

SEQ ID NO: 1329 - DNA, 20 bp, synthetic construct
  source 1..20: mol_type = other DNA
tagcctcagaatattgctca

SEQ ID NO: 1330 - DNA, 20 bp, synthetic construct
  source 1..20: mol_type = other DNA
tatagcctcagaatattgct

SEQ ID NO: 1331 - DNA, 20 bp, synthetic construct
  source 1..20: mol_type = other DNA
gtatagcctcagaatattgc

SEQ ID NO: 1332 - DNA, 20 bp, synthetic construct
  source 1..20: mol_type = other DNA
cagtatagcctcagaatatt

SEQ ID NO: 1333 - DNA, 20 bp, synthetic construct
  source 1..20: mol_type = other DNA
cacagtatagcctcagaata

SEQ ID NO: 1334 - DNA, 20 bp, synthetic construct
  source 1..20: mol_type = other DNA
taacacagtatagcctcaga

SEQ ID NO: 1335 - DNA, 20 bp, synthetic construct
  source 1..20: mol_type = other DNA
ttaacacagtatagcctcag

SEQ ID NO: 1336 - DNA, 20 bp, synthetic construct
  source 1..20: mol_type = other DNA
tttaacacagtatagcctca

SEQ ID NO: 1337 - DNA, 20 bp, synthetic construct
  source 1..20: mol_type = other DNA
gttgtgattctggaggctgc

SEQ ID NO: 1338 - DNA, 20 bp, synthetic construct
  source 1..20: mol_type = other DNA
tgttgtgattctggaggctg

SEQ ID NO: 1339 - DNA, 20 bp, synthetic construct
  source 1..20: mol_type = other DNA
ctgttgtgattctggaggct

SEQ ID NO: 1340 - DNA, 20 bp, synthetic construct
  source 1..20: mol_type = other DNA
tctgttgtgattctggaggc

SEQ ID NO: 1341 - DNA, 20 bp, synthetic construct
  source 1..20: mol_type = other DNA
gactctctctgaatctgttg

SEQ ID NO: 1342 - DNA, 20 bp, synthetic construct
  source 1..20: mol_type = other DNA
caaatgttgagctgtaatca

SEQ ID NO: 1343 - DNA, 20 bp, synthetic construct
  source 1..20: mol_type = other DNA
gcaaatgttgagctgtaatc

SEQ ID NO: 1344 - DNA, 20 bp, synthetic construct
  source 1..20: mol_type = other DNA
gcctgtaacaatagctgagg

SEQ ID NO: 1345 - DNA, 20 bp, synthetic construct
  source 1..20: mol_type = other DNA
catgaggacaaactgtaacc

SEQ ID NO: 1346 - DNA, 20 bp, synthetic construct
  source 1..20: mol_type = other DNA
ccatgaggacaaactgtaac

SEQ ID NO: 1347 - DNA, 20 bp, synthetic construct
  source 1..20: mol_type = other DNA
ctaaatttgagtccatgagg

SEQ ID NO: 1348 - DNA, 20 bp, synthetic construct
  source 1..20: mol_type = other DNA
tctaaatttgagtccatgag

SEQ ID NO: 1349 - DNA, 20 bp, synthetic construct
  source 1..20: mol_type = other DNA
cttctaaatttgagtccatg

SEQ ID NO: 1350 - DNA, 20 bp, synthetic construct
  source 1..20: mol_type = other DNA
gccatacttctaaatttgag

SEQ ID NO: 1351 - DNA, 20 bp, synthetic construct
  source 1..20: mol_type = other DNA
gcacttgttaaactgaacta

SEQ ID NO: 1352 - DNA, 20 bp, synthetic construct
  source 1..20: mol_type = other DNA
tgcacttgttaaactgaact

SEQ ID NO: 1353 - DNA, 20 bp, synthetic construct
  source 1..20: mol_type = other DNA
gtcagaagccatatgcactt

SEQ ID NO: 1354 - DNA, 20 bp, synthetic construct
  source 1..20: mol_type = other DNA
tgtcagaagccatatgcact

SEQ ID NO: 1355 - DNA, 20 bp, synthetic construct
  source 1..20: mol_type = other DNA
ttgtcagaagccatatgcac

SEQ ID NO: 1356 - DNA, 20 bp, synthetic construct
  source 1..20: mol_type = other DNA
tttgtcagaagccatatgca

SEQ ID NO: 1357 - DNA, 20 bp, synthetic construct
  source 1..20: mol_type = other DNA
ctttgtcagaagccatatgc

SEQ ID NO: 1358 - DNA, 20 bp, synthetic construct
  source 1..20: mol_type = other DNA
cctttgtcagaagccatatg

SEQ ID NO: 1359 - DNA, 20 bp, synthetic construct
  source 1..20: mol_type = other DNA
cacctttgtcagaagccata

SEQ ID NO: 1360 - DNA, 20 bp, synthetic construct
  source 1..20: mol_type = other DNA
cacacctttgtcagaagcca

SEQ ID NO: 1361 - DNA, 20 bp, synthetic construct
  source 1..20: mol_type = other DNA
ccacacctttgtcagaagcc

SEQ ID NO: 1362 - DNA, 20 bp, synthetic construct
  source 1..20: mol_type = other DNA
gccacacctttgtcagaagc

SEQ ID NO: 1363 - DNA, 20 bp, synthetic construct
  source 1..20: mol_type = other DNA
gaataccatgtaagtgacag

SEQ ID NO: 1364 - DNA, 20 bp, synthetic construct
  source 1..20: mol_type = other DNA
tgaataccatgtaagtgaca

SEQ ID NO: 1365 - DNA, 20 bp, synthetic construct
  source 1..20: mol_type = other DNA
ctgaataccatgtaagtgac

SEQ ID NO: 1366 - DNA, 20 bp, synthetic construct
  source 1..20: mol_type = other DNA
cctgaataccatgtaagtga

SEQ ID NO: 1367 - DNA, 20 bp, synthetic construct
  source 1..20: mol_type = other DNA
ccctgaataccatgtaagtg

SEQ ID NO: 1368 - DNA, 20 bp, synthetic construct
  source 1..20: mol_type = other DNA
tccctgaataccatgtaagt

SEQ ID NO: 1369 - DNA, 20 bp, synthetic construct
  source 1..20: mol_type = other DNA
ctccctgaataccatgtaag

SEQ ID NO: 1370 - DNA, 20 bp, synthetic construct
  source 1..20: mol_type = other DNA
cctccctgaataccatgtaa

SEQ ID NO: 1371 - DNA, 20 bp, synthetic construct
  source 1..20: mol_type = other DNA
tcctccctgaataccatgta

SEQ ID NO: 1372 - DNA, 20 bp, synthetic construct
  source 1..20: mol_type = other DNA
gtcctccctgaataccatgt

SEQ ID NO: 1373 - DNA, 20 bp, synthetic construct
  source 1..20: mol_type = other DNA
tgtcctccctgaataccatg

SEQ ID NO: 1374 - DNA, 20 bp, synthetic construct
  source 1..20: mol_type = other DNA
gtgtcctccctgaataccat

SEQ ID NO: 1375 - DNA, 20 bp, synthetic construct
  source 1..20: mol_type = other DNA
tgtgtcctccctgaatacca

SEQ ID NO: 1376 - DNA, 20 bp, synthetic construct
  source 1..20: mol_type = other DNA
ctcaatatgatctcaaagct

SEQ ID NO: 1377 - DNA, 20 bp, synthetic construct
  source 1..20: mol_type = other DNA
tctcaatatgatctcaaagc

SEQ ID NO: 1378 - DNA, 20 bp, synthetic construct
  source 1..20: mol_type = other DNA
gaacactcctcatatattac

SEQ ID NO: 1379 - DNA, 20 bp, synthetic construct
  source 1..20: mol_type = other DNA
cagaacactcctcatatatt

SEQ ID NO: 1380 - DNA, 20 bp, synthetic construct
  source 1..20: mol_type = other DNA
ccagaacactcctcatatat

SEQ ID NO: 1381 - DNA, 20 bp, synthetic construct
  source 1..20: mol_type = other DNA
gccagaacactcctcatata

SEQ ID NO: 1382 - DNA, 20 bp, synthetic construct
  source 1..20: mol_type = other DNA
tatgctcacagtcaaatctt

SEQ ID NO: 1383 - DNA, 20 bp, synthetic construct
  source 1..20: mol_type = other DNA
ttatgctcacagtcaaatct

SEQ ID NO: 1384 - DNA, 20 bp, synthetic construct
  source 1..20: mol_type = other DNA
gttatgctcacagtcaaatc

SEQ ID NO: 1385 - DNA, 20 bp, synthetic construct
  source 1..20: mol_type = other DNA
tgttatgctcacagtcaaat

SEQ ID NO: 1386 - DNA, 20 bp, synthetic construct
  source 1..20: mol_type = other DNA
caatgttatgctcacagtca

SEQ ID NO: 1387 - DNA, 20 bp, synthetic construct
  source 1..20: mol_type = other DNA
catgtcttgaatgaagtaac

SEQ ID NO: 1388 - DNA, 20 bp, synthetic construct
  source 1..20: mol_type = other DNA
ccatgtcttgaatgaagtaa

SEQ ID NO: 1389 - DNA, 20 bp, synthetic construct
  source 1..20: mol_type = other DNA
tccatgtcttgaatgaagta

SEQ ID NO: 1390 - DNA, 20 bp, synthetic construct
  source 1..20: mol_type = other DNA
ttccatgtcttgaatgaagt

SEQ ID NO: 1391 - DNA, 20 bp, synthetic construct
  source 1..20: mol_type = other DNA
cttccatgtcttgaatgaag

SEQ ID NO: 1392 - DNA, 20 bp, synthetic construct
  source 1..20: mol_type = other DNA
gcttccatgtcttgaatgaa

SEQ ID NO: 1393 - DNA, 20 bp, synthetic construct
  source 1..20: mol_type = other DNA
tgcttccatgtcttgaatga

SEQ ID NO: 1394 - DNA, 20 bp, synthetic construct
  source 1..20: mol_type = other DNA
ttgcttccatgtcttgaatg

SEQ ID NO: 1395 - DNA, 20 bp, synthetic construct
  source 1..20: mol_type = other DNA
gcagcactaattaacccttt

SEQ ID NO: 1396 - DNA, 20 bp, synthetic construct
  source 1..20: mol_type = other DNA
gagcagcactaattaaccct

SEQ ID NO: 1397 - DNA, 20 bp, synthetic construct
  source 1..20: mol_type = other DNA
tgagcagcactaattaaccc

SEQ ID NO: 1398 - DNA, 16 bp, synthetic construct
  source 1..16: mol_type = other DNA
gcagcactaattaacc

SEQ ID NO: 1399 - DNA, 20 bp, synthetic construct
  source 1..20: mol_type = other DNA
gaccaaagtaagccacatgg

SEQ ID NO: 1400 - DNA, 20 bp, synthetic construct
  source 1..20: mol_type = other DNA
tgaccaaagtaagccacatg

SEQ ID NO: 1401 - DNA, 20 bp, synthetic construct
  source 1..20: mol_type = other DNA
ttgaccaaagtaagccacat

SEQ ID NO: 1402 - DNA, 20 bp, synthetic construct
  source 1..20: mol_type = other DNA
tattgaccaaagtaagccac

SEQ ID NO: 1403 - DNA, 20 bp, synthetic construct
  source 1..20: mol_type = other DNA
ctattgaccaaagtaagcca

SEQ ID NO: 1404 - DNA, 20 bp, synthetic construct
  source 1..20: mol_type = other DNA
tctattgaccaaagtaagcc

SEQ ID NO: 1405 - DNA, 20 bp, synthetic construct
  source 1..20: mol_type = other DNA
ttctattgaccaaagtaagc

SEQ ID NO: 1406 - DNA, 16 bp, synthetic construct
  source 1..16: mol_type = other DNA
gtaaattgagccatac

SEQ ID NO: 1407 - DNA, 16 bp, synthetic construct
  source 1..16: mol_type = other DNA
gtcatgtaaattgagc

SEQ ID NO: 1408 - DNA, 16 bp, synthetic construct
  source 1..16: mol_type = other DNA
gttgcacaatggtcac

SEQ ID NO: 1409 - DNA, 16 bp, synthetic construct
  source 1..16: mol_type = other DNA
cagttgcacaatggtc

SEQ ID NO: 1410 - DNA, 16 bp, synthetic construct
  source 1..16: mol_type = other DNA
ttggacccttgtgatg

SEQ ID NO: 1411 - DNA, 16 bp, synthetic construct
  source 1..16: mol_type = other DNA
gattagttcataggga

SEQ ID NO: 1412 - DNA, 16 bp, synthetic construct
  source 1..16: mol_type = other DNA
ggtctgttgatactgt

SEQ ID NO: 1413 - DNA, 16 bp, synthetic construct
  source 1..16: mol_type = other DNA
gggtctgttgatactg

SEQ ID NO: 1414 - DNA, 16 bp, synthetic construct
  source 1..16: mol_type = other DNA
tgggtctgttgatact

SEQ ID NO: 1415 - DNA, 16 bp, synthetic construct
  source 1..16: mol_type = other DNA
ggataagtttcaacca

SEQ ID NO: 1416 - DNA, 16 bp, synthetic construct
  source 1..16: mol_type = other DNA
gtatttggtagtctcc

SEQ ID NO: 1417 - DNA, 16 bp, synthetic construct
  source 1..16: mol_type = other DNA
gcactttcaatcagcc

SEQ ID NO: 1418 - DNA, 16 bp, synthetic construct
  source 1..16: mol_type = other DNA
gggcaagcagttgatt

SEQ ID NO: 1419 - DNA, 16 bp, synthetic construct
  source 1..16: mol_type = other DNA
gagccaatcatagtac

SEQ ID NO: 1420 - DNA, 16 bp, synthetic construct
  source 1..16: mol_type = other DNA
tgttaggaaggtcacc

SEQ ID NO: 1421 - DNA, 16 bp, synthetic construct
  source 1..16: mol_type = other DNA
ggacaacttggcttga

SEQ ID NO: 1422 - DNA, 16 bp, synthetic construct
  source 1..16: mol_type = other DNA
tattggacaacttggc

SEQ ID NO: 1423 - DNA, 16 bp, synthetic construct
  source 1..16: mol_type = other DNA
ctgacaagtgatgccc

SEQ ID NO: 1424 - DNA, 16 bp, synthetic construct
  source 1..16: mol_type = other DNA
gcttagtgttcatgtc

SEQ ID NO: 1425 - DNA, 16 bp, synthetic construct
  source 1..16: mol_type = other DNA
ccaactacaagggacc

SEQ ID NO: 1426 - DNA, 16 bp, synthetic construct
  source 1..16: mol_type = other DNA
gccaactacaagggac

SEQ ID NO: 1427 - DNA, 16 bp, synthetic construct
  source 1..16: mol_type = other DNA
gtacctccaatacacc

SEQ ID NO: 1428 - DNA, 16 bp, synthetic construct
  source 1..16: mol_type = other DNA
tgtacctccaatacac

SEQ ID NO: 1429 - DNA, 16 bp, synthetic construct
  source 1..16: mol_type = other DNA
tcagatagagttagac

SEQ ID NO: 1430 - DNA, 16 bp, synthetic construct
  source 1..16: mol_type = other DNA
gggtaatatgggtcat

SEQ ID NO: 1431 - DNA, 16 bp, synthetic construct
  source 1..16: mol_type = other DNA
ttagaggtaactgtcc

SEQ ID NO: 1432 - DNA, 16 bp, synthetic construct
  source 1..16: mol_type = other DNA
ggttgtggtgtcattc

SEQ ID NO: 1433 - DNA, 16 bp, synthetic construct
  source 1..16: mol_type = other DNA
tcccatagtgacctaa

SEQ ID NO: 1434 - DNA, 16 bp, synthetic construct
  source 1..16: mol_type = other DNA
ctcccatagtgaccta

SEQ ID NO: 1435 - DNA, 16 bp, synthetic construct
  source 1..16: mol_type = other DNA
gcacttcactttaggg

SEQ ID NO: 1436 - DNA, 16 bp, synthetic construct
  source 1..16: mol_type = other DNA
gtcagttaccaatgtc

SEQ ID NO: 1437 - DNA, 16 bp, synthetic construct
  source 1..16: mol_type = other DNA
ggatagtcagttacca

SEQ ID NO: 1438 - DNA, 16 bp, synthetic construct
  source 1..16: mol_type = other DNA
gggatagtcagttacc

SEQ ID NO: 1439 - DNA, 16 bp, synthetic construct
  source 1..16: mol_type = other DNA
tgggatagtcagttac

SEQ ID NO: 1440 - DNA, 16 bp, synthetic construct
  source 1..16: mol_type = other DNA
ttgggcattacttacc

SEQ ID NO: 1441 - DNA, 16 bp, synthetic construct
  source 1..16: mol_type = other DNA
gttgggcattacttac

SEQ ID NO: 1442 - DNA, 16 bp, synthetic construct
  source 1..16: mol_type = other DNA
ctaggattagagagcc

SEQ ID NO: 1443 - DNA, 16 bp, synthetic construct
  source 1..16: mol_type = other DNA
ttggtgtaggatatgc

SEQ ID NO: 1444 - DNA, 16 bp, synthetic construct
  source 1..16: mol_type = other DNA
cttggtgtaggatatg

SEQ ID NO: 1445 - DNA, 16 bp, synthetic construct
  source 1..16: mol_type = other DNA
gagactcctatgccct

SEQ ID NO: 1446 - DNA, 16 bp, synthetic construct
  source 1..16: mol_type = other DNA
ggtcacagctatatgc

SEQ ID NO: 1447 - DNA, 16 bp, synthetic construct
  source 1..16: mol_type = other DNA
gcctaatctcagtgga

SEQ ID NO: 1448 - DNA, 16 bp, synthetic construct
  source 1..16: mol_type = other DNA
tagaacctagagtgtc

SEQ ID NO: 1449 - DNA, 16 bp, synthetic construct
  source 1..16: mol_type = other DNA
gtagaacctagagtgt

SEQ ID NO: 1450 - DNA, 16 bp, synthetic construct
  source 1..16: mol_type = other DNA
tgtagaacctagagtg

SEQ ID NO: 1451 - DNA, 16 bp, synthetic construct
  source 1..16: mol_type = other DNA
gcacttgttggaactc

SEQ ID NO: 1452 - DNA, 16 bp, synthetic construct
  source 1..16: mol_type = other DNA
ggaaggttatacatgc

SEQ ID NO: 1453 - DNA, 16 bp, synthetic construct
  source 1..16: mol_type = other DNA
gaggtgatccaatgac

SEQ ID NO: 1454 - DNA, 16 bp, synthetic construct
  source 1..16: mol_type = other DNA
gaattgacacactagg

SEQ ID NO: 1455 - DNA, 16 bp, synthetic construct
  source 1..16: mol_type = other DNA
gcttggatcattgtga

SEQ ID NO: 1456 - DNA, 16 bp, synthetic construct
  source 1..16: mol_type = other DNA
gagcattcaagtagac

SEQ ID NO: 1457 - DNA, 16 bp, synthetic construct
  source 1..16: mol_type = other DNA
gagtggcaacaggtcc

SEQ ID NO: 1458 - DNA, 20 bp, synthetic construct
  source 1..20: mol_type = other DNA
catgtaaattgagccataca

SEQ ID NO: 1459 - DNA, 20 bp, synthetic construct
  source 1..20: mol_type = other DNA
tcatgtaaattgagccatac

SEQ ID NO: 1460 - DNA, 20 bp, synthetic construct
  source 1..20: mol_type = other DNA
gtcatgtaaattgagccata

SEQ ID NO: 1461 - DNA, 20 bp, synthetic construct
  source 1..20: mol_type = other DNA
tgtcatgtaaattgagccat

SEQ ID NO: 1462 - DNA, 20 bp, synthetic construct
  source 1..20: mol_type = other DNA
ctaagcaaccacttatctgc

SEQ ID NO: 1463 - DNA, 20 bp, synthetic construct
  source 1..20: mol_type = other DNA
cctaagcaaccacttatctg

SEQ ID NO: 1464 - DNA, 20 bp, synthetic construct
  source 1..20: mol_type = other DNA
catgctattcaattcaccca

SEQ ID NO: 1465 - DNA, 20 bp, synthetic construct
  source 1..20: mol_type = other DNA
cacatgctattcaattcacc

SEQ ID NO: 1466 - DNA, 20 bp, synthetic construct
  source 1..20: mol_type = other DNA
ctgttgtaatggctttattg

SEQ ID NO: 1467 - DNA, 20 bp, synthetic construct
  source 1..20: mol_type = other DNA
gattctttctgttgtaatgg

SEQ ID NO: 1468 - DNA, 20 bp, synthetic construct
  source 1..20: mol_type = other DNA
gactgtgaccctccctgcta

SEQ ID NO: 1469 - DNA, 20 bp, synthetic construct
  source 1..20: mol_type = other DNA
ttaagtgacaactggtggga

SEQ ID NO: 1470 - DNA, 20 bp, synthetic construct
  source 1..20: mol_type = other DNA
gattaagtgacaactggtgg

SEQ ID NO: 1471 - DNA, 20 bp, synthetic construct
  source 1..20: mol_type = other DNA
gagattaagtgacaactggt

SEQ ID NO: 1472 - DNA, 20 bp, synthetic construct
  source 1..20: mol_type = other DNA
tgagattaagtgacaactgg

SEQ ID NO: 1473 - DNA, 20 bp, synthetic construct
  source 1..20: mol_type = other DNA
ctgagattaagtgacaactg

SEQ ID NO: 1474 - DNA, 20 bp, synthetic construct
  source 1..20: mol_type = other DNA
cctgagattaagtgacaact

SEQ ID NO: 1475 - DNA, 20 bp, synthetic construct
  source 1..20: mol_type = other DNA
tcctgagattaagtgacaac

SEQ ID NO: 1476 - DNA, 20 bp, synthetic construct
  source 1..20: mol_type = other DNA
ttcctgagattaagtgacaa

SEQ ID NO: 1477 - DNA, 20 bp, synthetic construct
  source 1..20: mol_type = other DNA
cttcctgagattaagtgaca

SEQ ID NO: 1478 - DNA, 20 bp, synthetic construct
  source 1..20: mol_type = other DNA
tcttcctgagattaagtgac

SEQ ID NO: 1479 - DNA, 20 bp, synthetic construct
  source 1..20: mol_type = other DNA
cagcacagctcagacctttg

SEQ ID NO: 1480 - DNA, 20 bp, synthetic construct
  source 1..20: mol_type = other DNA
ccagcacagctcagaccttt

SEQ ID NO: 1481 - DNA, 20 bp, synthetic construct
  source 1..20: mol_type = other DNA
gccagcacagctcagacctt

SEQ ID NO: 1482 - DNA, 20 bp, synthetic construct
  source 1..20: mol_type = other DNA
ttcagttgcacaatggtcac

SEQ ID NO: 1483 - DNA, 20 bp, synthetic construct
  source 1..20: mol_type = other DNA
gttcagttgcacaatggtca

SEQ ID NO: 1484 - DNA, 20 bp, synthetic construct
  source 1..20: mol_type = other DNA
gagtctgtttatattcctgc

SEQ ID NO: 1485 - DNA, 20 bp, synthetic construct
  source 1..20: mol_type = other DNA
gatgctgaaaggtggagtct

SEQ ID NO: 1486 - DNA, 20 bp, synthetic construct
  source 1..20: mol_type = other DNA
ccatgttcctaaccaagctc

SEQ ID NO: 1487 - DNA, 20 bp, synthetic construct
  source 1..20: mol_type = other DNA
gccatgttcctaaccaagct

SEQ ID NO: 1488 - DNA, 20 bp, synthetic construct
  source 1..20: mol_type = other DNA
ctgtcaagccatgttcctaa

SEQ ID NO: 1489 - DNA, 20 bp, synthetic construct
  source 1..20: mol_type = other DNA
tgatggatggagtttaacat

SEQ ID NO: 1490 - DNA, 20 bp, synthetic construct
  source 1..20: mol_type = other DNA
gtgatggatggagtttaaca

SEQ ID NO: 1491 - DNA, 20 bp, synthetic construct
  source 1..20: mol_type = other DNA
agtgatggatggagtttaac

SEQ ID NO: 1492 - DNA, 20 bp, synthetic construct
  source 1..20: mol_type = other DNA
tctaagacccagagtacatg

SEQ ID NO: 1493 - DNA, 20 bp, synthetic construct
  source 1..20: mol_type = other DNA
tccattctctaagacccaga

SEQ ID NO: 1494 - DNA, 20 bp, synthetic construct
  source 1..20: mol_type = other DNA
ttccattctctaagacccag

SEQ ID NO: 1495 - DNA, 20 bp, synthetic construct
  source 1..20: mol_type = other DNA
gacttctcatttatcctaag

SEQ ID NO: 1496 - DNA, 20 bp, synthetic construct
  source 1..20: mol_type = other DNA
ggcaatacactctggaaggc

SEQ ID NO: 1497 - DNA, 20 bp, synthetic construct
  source 1..20: mol_type = other DNA
gattcaggcaatacactctg

SEQ ID NO: 1498 - DNA, 20 bp, synthetic construct
  source 1..20: mol_type = other DNA
ggattcaggcaatacactct

SEQ ID NO: 1499 - DNA, 20 bp, synthetic construct
  source 1..20: mol_type = other DNA
caggattcaggcaatacact

SEQ ID NO: 1500 - DNA, 20 bp, synthetic construct
  source 1..20: mol_type = other DNA
cagtcatttgtgtgcttgtt

SEQ ID NO: 1501 - DNA, 20 bp, synthetic construct
  source 1..20: mol_type = other DNA
gaacagtcatttgtgtgctt

SEQ ID NO: 1502 - DNA, 20 bp, synthetic construct
  source 1..20: mol_type = other DNA
tgaacagtcatttgtgtgct

SEQ ID NO: 1503 - DNA, 20 bp, synthetic construct
  source 1..20: mol_type = other DNA
cagtctaccacagaatgaac

SEQ ID NO: 1504 - DNA, 20 bp, synthetic construct
  source 1..20: mol_type = other DNA
tattcagtctaccacagaat

SEQ ID NO: 1505 - DNA, 20 bp, synthetic construct
  source 1..20: mol_type = other DNA
ttattcagtctaccacagaa

SEQ ID NO: 1506 - DNA, 20 bp, synthetic construct
  source 1..20: mol_type = other DNA
tttattcagtctaccacaga

SEQ ID NO: 1507 - DNA, 20 bp, synthetic construct
  source 1..20: mol_type = other DNA
ctttattcagtctaccacag

SEQ ID NO: 1508 - DNA, 20 bp, synthetic construct
  source 1..20: mol_type = other DNA
caagatccttcacttagtca

SEQ ID NO: 1509 - DNA, 20 bp, synthetic construct
  source 1..20: mol_type = other DNA
tcaagatccttcacttagtc

SEQ ID NO: 1510 - DNA, 20 bp, synthetic construct
  source 1..20: mol_type = other DNA
gctcaagatccttcacttag

SEQ ID NO: 1511 - DNA, 20 bp, synthetic construct
  source 1..20: mol_type = other DNA
tccagctcaagatccttcac

SEQ ID NO: 1512 - DNA, 20 bp, synthetic construct
  source 1..20: mol_type = other DNA
ctccagctcaagatccttca

SEQ ID NO: 1513 - DNA, 20 bp, synthetic construct
  source 1..20: mol_type = other DNA
cagccagcctcttcaaactt

SEQ ID NO: 1514 - DNA, 20 bp, synthetic construct
  source 1..20: mol_type = other DNA
gcagccagcctcttcaaact

SEQ ID NO: 1515 - DNA, 20 bp, synthetic construct
  source 1..20: mol_type = other DNA
gagaaatgaacatctgttgt

SEQ ID NO: 1516 - DNA, 20 bp, synthetic construct
  source 1..20: mol_type = other DNA
tgagaaatgaacatctgttg

SEQ ID NO: 1517 - DNA, 20 bp, synthetic construct
  source 1..20: mol_type = other DNA
gtgagaaatgaacatctgtt

SEQ ID NO: 1518 - DNA, 20 bp, synthetic construct
  source 1..20: mol_type = other DNA
tgtgagaaatgaacatctgt

SEQ ID NO: 1519 - DNA, 20 bp, synthetic construct
  source 1..20: mol_type = other DNA
ctgtgagaaatgaacatctg

SEQ ID NO: 1520 - DNA, 20 bp, synthetic construct
  source 1..20: mol_type = other DNA
cagctataaaccaggaagtg

SEQ ID NO: 1521 - DNA, 20 bp, synthetic construct
  source 1..20: mol_type = other DNA
ccagctataaaccaggaagt

SEQ ID NO: 1522 - DNA, 20 bp, synthetic construct
  source 1..20: mol_type = other DNA
gccagctataaaccaggaag

SEQ ID NO: 1523 - DNA, 20 bp, synthetic construct
  source 1..20: mol_type = other DNA
tgccagctataaaccaggaa

SEQ ID NO: 1524 - DNA, 20 bp, synthetic construct
  source 1..20: mol_type = other DNA
gatgccagctataaaccagg

SEQ ID NO: 1525 - DNA, 20 bp, synthetic construct
  source 1..20: mol_type = other DNA
gaagatgccagctataaacc

SEQ ID NO: 1526 - DNA, 20 bp, synthetic construct
  source 1..20: mol_type = other DNA
tgagaagatgccagctataa

SEQ ID NO: 1527 - DNA, 20 bp, synthetic construct
  source 1..20: mol_type = other DNA
gtgagaagatgccagctata

SEQ ID NO: 1528 - DNA, 20 bp, synthetic construct
  source 1..20: mol_type = other DNA
cagtgagaagatgccagcta

SEQ ID NO: 1529 - DNA, 20 bp, synthetic construct
  source 1..20: mol_type = other DNA
cacagtgagaagatgccagc

SEQ ID NO: 1530 - DNA, 20 bp, synthetic construct
  source 1..20: mol_type = other DNA
ggaccctagaaagagacttt

SEQ ID NO: 1531 - DNA, 20 bp, synthetic construct
  source 1..20: mol_type = other DNA
tgattagttcatagggatga

SEQ ID NO: 1532 - DNA, 20 bp, synthetic construct
  source 1..20: mol_type = other DNA
gtgtgtcccacccaaattca

SEQ ID NO: 1533 - DNA, 20 bp, synthetic construct
  source 1..20: mol_type = other DNA
tattacctgctacagactga

SEQ ID NO: 1534 - DNA, 20 bp, synthetic construct
  source 1..20: mol_type = other DNA
ttattacctgctacagactg

SEQ ID NO: 1535 - DNA, 20 bp, synthetic construct
  source 1..20: mol_type = other DNA
cttattacctgctacagact

SEQ ID NO: 1536 - DNA, 20 bp, synthetic construct
  source 1..20: mol_type = other DNA
gcttattacctgctacagac

SEQ ID NO: 1537 - DNA, 20 bp, synthetic construct
  source 1..20: mol_type = other DNA
tgcttattacctgctacaga

SEQ ID NO: 1538 - DNA, 20 bp, synthetic construct
  source 1..20: mol_type = other DNA
tatgcttattacctgctaca

SEQ ID NO: 1539 - DNA, 20 bp, synthetic construct
  source 1..20: mol_type = other DNA
catatgcttattacctgcta

SEQ ID NO: 1540 - DNA, 20 bp, synthetic construct
  source 1..20: mol_type = other DNA
gacatatgcttattacctgc

SEQ ID NO: 1541 - DNA, 20 bp, synthetic construct
  source 1..20: mol_type = other DNA
ctgtaacaaagcacacaagc

SEQ ID NO: 1542 - DNA, 20 bp, synthetic construct
  source 1..20: mol_type = other DNA
ttgtgaaaccttgcctgttt

SEQ ID NO: 1543 - DNA, 20 bp, synthetic construct
  source 1..20: mol_type = other DNA
cttgtgaaaccttgcctgtt

SEQ ID NO: 1544 - DNA, 20 bp, synthetic construct
  source 1..20: mol_type = other DNA
tcttgtgaaaccttgcctgt

SEQ ID NO: 1545 - DNA, 20 bp, synthetic construct
  source 1..20: mol_type = other DNA
ttcttgtgaaaccttgcctg

SEQ ID NO: 1546 - DNA, 20 bp, synthetic construct
  source 1..20: mol_type = other DNA
cagcttcctttcttgtgaaa

SEQ ID NO: 1547 - DNA, 20 bp, synthetic construct
  source 1..20: mol_type = other DNA
cagtgtcctccagaactagt

SEQ ID NO: 1548 - DNA, 20 bp, synthetic construct
  source 1..20: mol_type = other DNA
ttgatactgtgggaaggaca

SEQ ID NO: 1549 - DNA, 20 bp, synthetic construct
  source 1..20: mol_type = other DNA
gttgatactgtgggaaggac

SEQ ID NO: 1550 - DNA, 20 bp, synthetic construct
  source 1..20: mol_type = other DNA
tgttgatactgtgggaagga

SEQ ID NO: 1551 - DNA, 20 bp, synthetic construct
  source 1..20: mol_type = other DNA
gtctgttgatactgtgggaa

SEQ ID NO: 1552 - DNA, 20 bp, synthetic construct
  source 1..20: mol_type = other DNA
ggtctgttgatactgtggga

SEQ ID NO: 1553 - DNA, 20 bp, synthetic construct
  source 1..20: mol_type = other DNA
gggtctgttgatactgtggg

SEQ ID NO: 1554 - DNA, 20 bp, synthetic construct
  source 1..20: mol_type = other DNA
tgggtctgttgatactgtgg

SEQ ID NO: 1555 - DNA, 20 bp, synthetic construct
  source 1..20: mol_type = other DNA
ctgggtctgttgatactgtg

SEQ ID NO: 1556 - DNA, 20 bp, synthetic construct
  source 1..20: mol_type = other DNA
ttcaaccagagagtcagaga

SEQ ID NO: 1557 - DNA, 20 bp, synthetic construct
  source 1..20: mol_type = other DNA
tttcaaccagagagtcagag

SEQ ID NO: 1558 - DNA, 20 bp, synthetic construct
  source 1..20: mol_type = other DNA
gtttcaaccagagagtcaga

SEQ ID NO: 1559 - DNA, 20 bp, synthetic construct
  source 1..20: mol_type = other DNA
gataagtttcaaccagagag

SEQ ID NO: 1560 - DNA, 20 bp, synthetic construct
  source 1..20: mol_type = other DNA
ggataagtttcaaccagaga

SEQ ID NO: 1561 - DNA, 20 bp, synthetic construct
  source 1..20: mol_type = other DNA
tggataagtttcaaccagag

SEQ ID NO: 1562 - DNA, 20 bp, synthetic construct
  source 1..20: mol_type = other DNA
cacaagaattgggaaactcc

SEQ ID NO: 1563 - DNA, 20 bp, synthetic construct
  source 1..20: mol_type = other DNA
cacacaagaattgggaaact

SEQ ID NO: 1564 - DNA, 20 bp, synthetic construct
  source 1..20: mol_type = other DNA
cacacacacaagaattggga

SEQ ID NO: 1565 - DNA, 20 bp, synthetic construct
  source 1..20: mol_type = other DNA
ccacacacacaagaattggg

SEQ ID NO: 1566 - DNA, 20 bp, synthetic construct
  source 1..20: mol_type = other DNA
cccacacacacaagaattgg

SEQ ID NO: 1567 - DNA, 20 bp, synthetic construct
  source 1..20: mol_type = other DNA
gacaacttgcagagataagc

SEQ ID NO: 1568 - DNA, 20 bp, synthetic construct
  source 1..20: mol_type = other DNA
cagagacaacttgcagagat

SEQ ID NO: 1569 - DNA, 20 bp, synthetic construct
  source 1..20: mol_type = other DNA
ccagagacaacttgcagaga

SEQ ID NO: 1570 - DNA, 20 bp, synthetic construct
  source 1..20: mol_type = other DNA
tccagagacaacttgcagag

SEQ ID NO: 1571 - DNA, 20 bp, synthetic construct
  source 1..20: mol_type = other DNA
catccagagacaacttgcag

SEQ ID NO: 1572 - DNA, 20 bp, synthetic construct
  source 1..20: mol_type = other DNA
gacatccagagacaacttgc

SEQ ID NO: 1573 - DNA, 20 bp, synthetic construct
  source 1..20: mol_type = other DNA
gagacatccagagacaactt

SEQ ID NO: 1574 - DNA, 20 bp, synthetic construct
  source 1..20: mol_type = other DNA
tgagacatccagagacaact

SEQ ID NO: 1575 - DNA, 20 bp, synthetic construct
  source 1..20: mol_type = other DNA
gtgagacatccagagacaac

SEQ ID NO: 1576 - DNA, 20 bp, synthetic construct
  source 1..20: mol_type = other DNA
tgtgagacatccagagacaa

SEQ ID NO: 1577 - DNA, 20 bp, synthetic construct
  source 1..20: mol_type = other DNA
gaacagactccaagcaactg

SEQ ID NO: 1578 - DNA, 20 bp, synthetic construct
  source 1..20: mol_type = other DNA
tgaacagactccaagcaact

SEQ ID NO: 1579 - DNA, 20 bp, synthetic construct
  source 1..20: mol_type = other DNA
ctgctgaacagactccaagc

SEQ ID NO: 1580 - DNA, 20 bp, synthetic construct
  source 1..20: mol_type = other DNA
gctgctgaacagactccaag

SEQ ID NO: 1581 - DNA, 20 bp, synthetic construct
  source 1..20: mol_type = other DNA
ctcagaacatagatggcaaa

SEQ ID NO: 1582 - DNA, 20 bp, synthetic construct
  source 1..20: mol_type = other DNA
caactcagaacatagatggc

SEQ ID NO: 1583 - DNA, 20 bp, synthetic construct
  source 1..20: mol_type = other DNA
tcaactcagaacatagatgg

SEQ ID NO: 1584 - DNA, 20 bp, synthetic construct
  source 1..20: mol_type = other DNA
catcaactcagaacatagat

SEQ ID NO: 1585 - DNA, 20 bp, synthetic construct
  source 1..20: mol_type = other DNA
gacatcaactcagaacatag

SEQ ID NO: 1586 - DNA, 20 bp, synthetic construct
  source 1..20: mol_type = other DNA
caagacatcaactcagaaca

SEQ ID NO: 1587 - DNA, 20 bp, synthetic construct
  source 1..20: mol_type = other DNA
tcaagacatcaactcagaac

SEQ ID NO: 1588 - DNA, 20 bp, synthetic construct
  source 1..20: mol_type = other DNA
tttcaaaggagtggagagct

SEQ ID NO: 1589 - DNA, 20 bp, synthetic construct
  source 1..20: mol_type = other DNA
taaccacagaatccctagcc

SEQ ID NO: 1590 - DNA, 20 bp, synthetic construct
  source 1..20: mol_type = other DNA
gaataaccacagaatcccta

SEQ ID NO: 1591 - DNA, 20 bp, synthetic construct
  source 1..20: mol_type = other DNA
ggaataaccacagaatccct

SEQ ID NO: 1592 - DNA, 20 bp, synthetic construct
  source 1..20: mol_type = other DNA
tgacactgtaaactcctagt

SEQ ID NO: 1593 - DNA, 20 bp, synthetic construct
  source 1..20: mol_type = other DNA
catgacactgtaaactccta

SEQ ID NO: 1594 - DNA, 20 bp, synthetic construct
  source 1..20: mol_type = other DNA
ccatgacactgtaaactcct

SEQ ID NO: 1595 - DNA, 20 bp, synthetic construct
  source 1..20: mol_type = other DNA
tccatgacactgtaaactcc

SEQ ID NO: 1596 - DNA, 20 bp, synthetic construct
  source 1..20: mol_type = other DNA
ctccatgacactgtaaactc

SEQ ID NO: 1597 - DNA, 20 bp, synthetic construct
  source 1..20: mol_type = other DNA
tctccatgacactgtaaact

SEQ ID NO: 1598 - DNA, 20 bp, synthetic construct
  source 1..20: mol_type = other DNA
gttctgtatttggtagtctc

SEQ ID NO: 1599 - DNA, 20 bp, synthetic construct
  source 1..20: mol_type = other DNA
tagttctgtatttggtagtc

SEQ ID NO: 1600 - DNA, 20 bp, synthetic construct
  source 1..20: mol_type = other DNA
catagttctgtatttggtag

SEQ ID NO: 1601 - DNA, 20 bp, synthetic construct
  source 1..20: mol_type = other DNA
gcatagttctgtatttggta

SEQ ID NO: 1602 - DNA, 20 bp, synthetic construct
  source 1..20: mol_type = other DNA
tgcatagttctgtatttggt

SEQ ID NO: 1603 - DNA, 20 bp, synthetic construct
  source 1..20: mol_type = other DNA
ttgcatagttctgtatttgg

SEQ ID NO: 1604 - DNA, 20 bp, synthetic construct
  source 1..20: mol_type = other DNA
gatgtttgcatagttctgta

SEQ ID NO: 1605 - DNA, 20 bp, synthetic construct
  source 1..20: mol_type = other DNA
ggaattagatgtttgcatag

SEQ ID NO: 1606 - DNA, 20 bp, synthetic construct
  source 1..20: mol_type = other DNA
caatggaattagatgtttgc

SEQ ID NO: 1607 - DNA, 20 bp, synthetic construct
  source 1..20: mol_type = other DNA
catcacaatggaattagatg

SEQ ID NO: 1608 - DNA, 20 bp, synthetic construct
  source 1..20: mol_type = other DNA
ctcatcacaatggaattaga

SEQ ID NO: 1609 - DNA, 20 bp, synthetic construct
  source 1..20: mol_type = other DNA
cctcatcacaatggaattag

SEQ ID NO: 1610 - DNA, 20 bp, synthetic construct
  source 1..20: mol_type = other DNA
ccctcatcacaatggaatta

SEQ ID NO: 1611 - DNA, 20 bp, synthetic construct
  source 1..20: mol_type = other DNA
taaacatcacactcatggat

SEQ ID NO: 1612 - DNA, 20 bp, synthetic construct
  source 1..20: mol_type = other DNA
ctaaacatcacactcatgga

SEQ ID NO: 1613 - DNA, 20 bp, synthetic construct
  source 1..20: mol_type = other DNA
cctaaacatcacactcatgg

SEQ ID NO: 1614 - DNA, 20 bp, synthetic construct
  source 1..20: mol_type = other DNA
gcctaaacatcacactcatg

SEQ ID NO: 1615 - DNA, 20 bp, synthetic construct
  source 1..20: mol_type = other DNA
cagcctaaacatcacactca

SEQ ID NO: 1616 - DNA, 20 bp, synthetic construct
  source 1..20: mol_type = other DNA
tcagcctaaacatcacactc

SEQ ID NO: 1617 - DNA, 20 bp, synthetic construct
  source 1..20: mol_type = other DNA
ctcagcctaaacatcacact

SEQ ID NO: 1618 - DNA, 20 bp, synthetic construct
  source 1..20: mol_type = other DNA
tctcagcctaaacatcacac

SEQ ID NO: 1619 - DNA, 20 bp, synthetic construct
  source 1..20: mol_type = other DNA
ctctcagcctaaacatcaca

SEQ ID NO: 1620 - DNA, 20 bp, synthetic construct
  source 1..20: mol_type = other DNA
tactctcagcctaaacatca

SEQ ID NO: 1621 - DNA, 20 bp, synthetic construct
  source 1..20: mol_type = other DNA
ctactctcagcctaaacatc

SEQ ID NO: 1622 - DNA, 20 bp, synthetic construct
  source 1..20: mol_type = other DNA
tctactctcagcctaaacat

SEQ ID NO: 1623 - DNA, 20 bp, synthetic construct
  source 1..20: mol_type = other DNA
gtctactctcagcctaaaca

SEQ ID NO: 1624 - DNA, 20 bp, synthetic construct
  source 1..20: mol_type = other DNA
tgtctactctcagcctaaac

SEQ ID NO: 1625 - DNA, 20 bp, synthetic construct
  source 1..20: mol_type = other DNA
gtgtctactctcagcctaaa

SEQ ID NO: 1626 - DNA, 20 bp, synthetic construct
  source 1..20: mol_type = other DNA
tcaggtgtctactctcagcc

SEQ ID NO: 1627 - DNA, 20 bp, synthetic construct
  source 1..20: mol_type = other DNA
ctcaggtgtctactctcagc

SEQ ID NO: 1628 - DNA, 20 bp, synthetic construct
  source 1..20: mol_type = other DNA
gacacagtccattccctgcc

SEQ ID NO: 1629 - DNA, 20 bp, synthetic construct
  source 1..20: mol_type = other DNA
cacagacacagtccattccc

SEQ ID NO: 1630 - DNA, 20 bp, synthetic construct
  source 1..20: mol_type = other DNA
cacacagacacagtccattc

SEQ ID NO: 1631 - DNA, 20 bp, synthetic construct
  source 1..20: mol_type = other DNA
cacacacagacacagtccat

SEQ ID NO: 1632 - DNA, 20 bp, synthetic construct
  source 1..20: mol_type = other DNA
tcccagacagataagtgaac

SEQ ID NO: 1633 - DNA, 20 bp, synthetic construct
  source 1..20: mol_type = other DNA
ttcccagacagataagtgaa

SEQ ID NO: 1634 - DNA, 20 bp, synthetic construct
  source 1..20: mol_type = other DNA
gttcccagacagataagtga

SEQ ID NO: 1635 - DNA, 20 bp, synthetic construct
  source 1..20: mol_type = other DNA
cactttcaatcagcctctgg

SEQ ID NO: 1636 - DNA, 20 bp, synthetic construct
  source 1..20: mol_type = other DNA
gcactttcaatcagcctctg

SEQ ID NO: 1637 - DNA, 20 bp, synthetic construct
  source 1..20: mol_type = other DNA
cagcactttcaatcagcctc

SEQ ID NO: 1638 - DNA, 20 bp, synthetic construct
  source 1..20: mol_type = other DNA
ccagcactttcaatcagcct

SEQ ID NO: 1639 - DNA, 20 bp, synthetic construct
  source 1..20: mol_type = other DNA
tccagcactttcaatcagcc

SEQ ID NO: 1640 - DNA, 20 bp, synthetic construct
  source 1..20: mol_type = other DNA
ttccagcactttcaatcagc

SEQ ID NO: 1641 - DNA, 20 bp, synthetic construct
  source 1..20: mol_type = other DNA
cttccagcactttcaatcag

SEQ ID NO: 1642 - DNA, 20 bp, synthetic construct
  source 1..20: mol_type = other DNA
ggtctcccagttgttcatgc

SEQ ID NO: 1643 - DNA, 20 bp, synthetic construct
  source 1..20: mol_type = other DNA
ccaaggtctcccagttgttc

SEQ ID NO: 1644 - DNA, 20 bp, synthetic construct
  source 1..20: mol_type = other DNA
cccaaggtctcccagttgtt

SEQ ID NO: 1645 - DNA, 20 bp, synthetic construct
  source 1..20: mol_type = other DNA
ccacagaacagtcacatggg

SEQ ID NO: 1646 - DNA, 20 bp, synthetic construct
  source 1..20: mol_type = other DNA
gccacagaacagtcacatgg

SEQ ID NO: 1647 - DNA, 20 bp, synthetic construct
  source 1..20: mol_type = other DNA
catcagagccacagaacagt

SEQ ID NO: 1648 - DNA, 20 bp, synthetic construct
  source 1..20: mol_type = other DNA
tcacatcagagccacagaac

SEQ ID NO: 1649 - DNA, 20 bp, synthetic construct
  source 1..20: mol_type = other DNA
gtcacatcagagccacagaa

SEQ ID NO: 1650 - DNA, 20 bp, synthetic construct
  source 1..20: mol_type = other DNA
cagtcacatcagagccacag

SEQ ID NO: 1651 - DNA, 20 bp, synthetic construct
  source 1..20: mol_type = other DNA
gcagtcacatcagagccaca

SEQ ID NO: 1652 - DNA, 20 bp, synthetic construct
  source 1..20: mol_type = other DNA
gagcagtcacatcagagcca

SEQ ID NO: 1653 - DNA, 20 bp, synthetic construct
  source 1..20: mol_type = other DNA
cagagcagtcacatcagagc

SEQ ID NO: 1654 - DNA, 20 bp, synthetic construct
  source 1..20: mol_type = other DNA
cacagagcagtcacatcaga

SEQ ID NO: 1655 - DNA, 20 bp, synthetic construct
  source 1..20: mol_type = other DNA
ccacagagcagtcacatcag

SEQ ID NO: 1656 - DNA, 20 bp, synthetic construct
  source 1..20: mol_type = other DNA
gccacagagcagtcacatca

SEQ ID NO: 1657 - DNA, 20 bp, synthetic construct
  source 1..20: mol_type = other DNA
gagccacagagcagtcacat

SEQ ID NO: 1658 - DNA, 20 bp, synthetic construct
  source 1..20: mol_type = other DNA
cagagccacagagcagtcac

SEQ ID NO: 1659 - DNA, 20 bp, synthetic construct
  source 1..20: mol_type = other DNA
tcagagccacagagcagtca

SEQ ID NO: 1660 - DNA, 20 bp, synthetic construct
  source 1..20: mol_type = other DNA
catcagagccacagagcagt

SEQ ID NO: 1661 - DNA, 20 bp, synthetic construct
  source 1..20: mol_type = other DNA
cacatcagagccacagagca

SEQ ID NO: 1662 - DNA, 20 bp, synthetic construct
  source 1..20: mol_type = other DNA
tcacatcagagccacagagc

SEQ ID NO: 1663 - DNA, 20 bp, synthetic construct
  source 1..20: mol_type = other DNA
gtcacatcagagccacagag

SEQ ID NO: 1664 - DNA, 20 bp, synthetic construct
  source 1..20: mol_type = other DNA
gagtcacatcagagccacag

SEQ ID NO: 1665 - DNA, 20 bp, synthetic construct
  source 1..20: mol_type = other DNA
gaagagtcacatcagagcca

SEQ ID NO: 1666 - DNA, 20 bp, synthetic construct
  source 1..20: mol_type = other DNA
cagaagagtcacatcagagc

SEQ ID NO: 1667 - DNA, 20 bp, synthetic construct
  source 1..20: mol_type = other DNA
cacagaagagtcacatcaga

SEQ ID NO: 1668 - DNA, 20 bp, synthetic construct
  source 1..20: mol_type = other DNA
ccacagaagagtcacatcag

SEQ ID NO: 1669 - DNA, 20 bp, synthetic construct
  source 1..20: mol_type = other DNA
gccacagaagagtcacatca

SEQ ID NO: 1670 - DNA, 20 bp, synthetic construct
  source 1..20: mol_type = other DNA
cagacacataagagccacag

SEQ ID NO: 1671 - DNA, 20 bp, synthetic construct
  source 1..20: mol_type = other DNA
gccacagaacagacacataa

SEQ ID NO: 1672 - DNA, 20 bp, synthetic construct
  source 1..20: mol_type = other DNA
gagccacagaacagacacat

SEQ ID NO: 1673 - DNA, 20 bp, synthetic construct
  source 1..20: mol_type = other DNA
cagagccacagaacagacac

SEQ ID NO: 1674 - DNA, 20 bp, synthetic construct
  source 1..20: mol_type = other DNA
tcagagccacagaacagaca

SEQ ID NO: 1675 - DNA, 20 bp, synthetic construct
  source 1..20: mol_type = other DNA
ttcagagccacagaacagac

SEQ ID NO: 1676 - DNA, 20 bp, synthetic construct
  source 1..20: mol_type = other DNA
cttcagagccacagaacaga

SEQ ID NO: 1677 - DNA, 20 bp, synthetic construct
  source 1..20: mol_type = other DNA
cacttcagagccacagaaca

SEQ ID NO: 1678 - DNA, 20 bp, synthetic construct
  source 1..20: mol_type = other DNA
tcacttcagagccacagaac

SEQ ID NO: 1679 - DNA, 20 bp, synthetic construct
  source 1..20: mol_type = other DNA
gtcacttcagagccacagaa

SEQ ID NO: 1680 - DNA, 20 bp, synthetic construct
  source 1..20: mol_type = other DNA
gagtcacttcagagccacag

SEQ ID NO: 1681 - DNA, 20 bp, synthetic construct
  source 1..20: mol_type = other DNA
cacagaagagttgcattgga

SEQ ID NO: 1682 - DNA, 20 bp, synthetic construct
  source 1..20: mol_type = other DNA
ccacagaagagttgcattgg

SEQ ID NO: 1683 - DNA, 20 bp, synthetic construct
  source 1..20: mol_type = other DNA
cagaacagtcacatcagggc

SEQ ID NO: 1684 - DNA, 20 bp, synthetic construct
  source 1..20: mol_type = other DNA
gcagaacagtcacatcaggg

SEQ ID NO: 1685 - DNA, 20 bp, synthetic construct
  source 1..20: mol_type = other DNA
cagaacagtctcatagagct

SEQ ID NO: 1686 - DNA, 20 bp, synthetic construct
  source 1..20: mol_type = other DNA
cacagaacagtctcatagag

SEQ ID NO: 1687 - DNA, 20 bp, synthetic construct
  source 1..20: mol_type = other DNA
ccacagaacagtctcataga

SEQ ID NO: 1688 - DNA, 20 bp, synthetic construct
  source 1..20: mol_type = other DNA
gccacagaacagtctcatag

SEQ ID NO: 1689 - DNA, 20 bp, synthetic construct
  source 1..20: mol_type = other DNA
cagagccacagaacagtctc

SEQ ID NO: 1690 - DNA, 20 bp, synthetic construct
  source 1..20: mol_type = other DNA
tcagagccacagaacagtct

SEQ ID NO: 1691 - DNA, 20 bp, synthetic construct
  source 1..20: mol_type = other DNA
catcagagccacagaacagt

SEQ ID NO: 1692 - DNA, 20 bp, synthetic construct
  source 1..20: mol_type = other DNA
tcacatcagagccacagaac

SEQ ID NO: 1693 - DNA, 20 bp, synthetic construct
  source 1..20: mol_type = other DNA
gtcacatcagagccacagaa

SEQ ID NO: 1694 - DNA, 20 bp, synthetic construct
  source 1..20: mol_type = other DNA
gagtcacatcagagccacag

SEQ ID NO: 1695 - DNA, 20 bp, synthetic construct
  source 1..20: mol_type = other DNA
gaagagtcacatcagagcca

SEQ ID NO: 1696 - DNA, 20 bp, synthetic construct
  source 1..20: mol_type = other DNA
cagaagagtcacatcagagc

SEQ ID NO: 1697 - DNA, 20 bp, synthetic construct
  source 1..20: mol_type = other DNA
tgcagaagagtcacatcaga

SEQ ID NO: 1698 - DNA, 20 bp, synthetic construct
  source 1..20: mol_type = other DNA
ggaacagttacatcagagct

SEQ ID NO: 1699 - DNA, 20 bp, synthetic construct
  source 1..20: mol_type = other DNA
gtggctctgaagaatgtggg

SEQ ID NO: 1700 - DNA, 20 bp, synthetic construct
  source 1..20: mol_type = other DNA
tgtggctctgaagaatgtgg

SEQ ID NO: 1701 - DNA, 20 bp, synthetic construct
  source 1..20: mol_type = other DNA
gtgtggctctgaagaatgtg

SEQ ID NO: 1702 - DNA, 20 bp, synthetic construct
  source 1..20: mol_type = other DNA
caaagcttccatctgagtgt

SEQ ID NO: 1703 - DNA, 20 bp, synthetic construct
  source 1..20: mol_type = other DNA
gcaaagcttccatctgagtg

SEQ ID NO: 1704 - DNA, 20 bp, synthetic construct
  source 1..20: mol_type = other DNA
cacacagcaaagcttccatc

SEQ ID NO: 1705 - DNA, 20 bp, synthetic construct
  source 1..20: mol_type = other DNA
gcacacagcaaagcttccat

SEQ ID NO: 1706 - DNA, 20 bp, synthetic construct
  source 1..20: mol_type = other DNA
gatgaatgacagttggtttc

SEQ ID NO: 1707 - DNA, 20 bp, synthetic construct
  source 1..20: mol_type = other DNA
tcttcaggaaagacaggcag

SEQ ID NO: 1708 - DNA, 20 bp, synthetic construct
  source 1..20: mol_type = other DNA
gagggagctgggacatttat

SEQ ID NO: 1709 - DNA, 20 bp, synthetic construct
  source 1..20: mol_type = other DNA
tgatctcaggaagcacagtg

SEQ ID NO: 1710 - DNA, 20 bp, synthetic construct
  source 1..20: mol_type = other DNA
gccaatcatagtacatacaa

SEQ ID NO: 1711 - DNA, 20 bp, synthetic construct
  source 1..20: mol_type = other DNA
gagccaatcatagtacatac

SEQ ID NO: 1712 - DNA, 20 bp, synthetic construct
  source 1..20: mol_type = other DNA
cagagccaatcatagtacat

SEQ ID NO: 1713 - DNA, 20 bp, synthetic construct
  source 1..20: mol_type = other DNA
gacagagccaatcatagtac

SEQ ID NO: 1714 - DNA, 20 bp, synthetic construct
  source 1..20: mol_type = other DNA
tgacagagccaatcatagta

SEQ ID NO: 1715 - DNA, 20 bp, synthetic construct
  source 1..20: mol_type = other DNA
ctgacagagccaatcatagt

SEQ ID NO: 1716 - DNA, 20 bp, synthetic construct
  source 1..20: mol_type = other DNA
taaactgacagagccaatca

SEQ ID NO: 1717 - DNA, 20 bp, synthetic construct
  source 1..20: mol_type = other DNA
ttaaactgacagagccaatc

SEQ ID NO: 1718 - DNA, 20 bp, synthetic construct
  source 1..20: mol_type = other DNA
cattaaactgacagagccaa

SEQ ID NO: 1719 - DNA, 20 bp, synthetic construct
  source 1..20: mol_type = other DNA
ccattaaactgacagagcca

SEQ ID NO: 1720 - DNA, 20 bp, synthetic construct
  source 1..20: mol_type = other DNA
tccattaaactgacagagcc

SEQ ID NO: 1721 - DNA, 20 bp, synthetic construct
  source 1..20: mol_type = other DNA
ttccattaaactgacagagc

SEQ ID NO: 1722 - DNA, 20 bp, synthetic construct
  source 1..20: mol_type = other DNA
tttccattaaactgacagag

SEQ ID NO: 1723 - DNA, 20 bp, synthetic construct
  source 1..20: mol_type = other DNA
taatgcaccattaccaactt

SEQ ID NO: 1724 - DNA, 20 bp, synthetic construct
  source 1..20: mol_type = other DNA
ccaagcattattcctaagat

SEQ ID NO: 1725 - DNA, 20 bp, synthetic construct
  source 1..20: mol_type = other DNA
caccaagcattattcctaag

SEQ ID NO: 1726 - DNA, 20 bp, synthetic construct
  source 1..20: mol_type = other DNA
tcaccaagcattattcctaa

SEQ ID NO: 1727 - DNA, 20 bp, synthetic construct
  source 1..20: mol_type = other DNA
ttcaccaagcattattccta

SEQ ID NO: 1728 - DNA, 20 bp, synthetic construct
  source 1..20: mol_type = other DNA
gtttcaccaagcattattcc

SEQ ID NO: 1729 - DNA, 20 bp, synthetic construct
  source 1..20: mol_type = other DNA
tgtttcaccaagcattattc

SEQ ID NO: 1730 - DNA, 20 bp, synthetic construct
  source 1..20: mol_type = other DNA
ggcaaattaattgagacaca

SEQ ID NO: 1731 - DNA, 20 bp, synthetic construct
  source 1..20: mol_type = other DNA
gacacctgctttctgacatc

SEQ ID NO: 1732 - DNA, 20 bp, synthetic construct
  source 1..20: mol_type = other DNA
tagacacctgctttctgaca

SEQ ID NO: 1733 - DNA, 20 bp, synthetic construct
  source 1..20: mol_type = other DNA
ttagacacctgctttctgac

SEQ ID NO: 1734 - DNA, 20 bp, synthetic construct
  source 1..20: mol_type = other DNA
tttagacacctgctttctga

SEQ ID NO: 1735 - DNA, 20 bp, synthetic construct
  source 1..20: mol_type = other DNA
tcttagaaggaagagtgact

SEQ ID NO: 1736 - DNA, 20 bp, synthetic construct
  source 1..20: mol_type = other DNA
gacaacttggcttgattctg

SEQ ID NO: 1737 - DNA, 20 bp, synthetic construct
  source 1..20: mol_type = other DNA
ggacaacttggcttgattct

SEQ ID NO: 1738 - DNA, 20 bp, synthetic construct
  source 1..20: mol_type = other DNA
tggacaacttggcttgattc

SEQ ID NO: 1739 - DNA, 20 bp, synthetic construct
  source 1..20: mol_type = other DNA
ttggacaacttggcttgatt

SEQ ID NO: 1740 - DNA, 20 bp, synthetic construct
  source 1..20: mol_type = other DNA
tattggacaacttggcttga

SEQ ID NO: 1741 - DNA, 20 bp, synthetic construct
  source 1..20: mol_type = other DNA
tcctcaggcagcacagatga

SEQ ID NO: 1742 - DNA, 20 bp, synthetic construct
  source 1..20: mol_type = other DNA
catcctcaggcagcacagat

SEQ ID NO: 1743 - DNA, 20 bp, synthetic construct
  source 1..20: mol_type = other DNA
cacatcctcaggcagcacag

SEQ ID NO: 1744 - DNA, 20 bp, synthetic construct
  source 1..20: mol_type = other DNA
tcacatcctcaggcagcaca

SEQ ID NO: 1745 - DNA, 20 bp, synthetic construct
  source 1..20: mol_type = other DNA
gtcacatcctcaggcagcac

SEQ ID NO: 1746 - DNA, 20 bp, synthetic construct
  source 1..20: mol_type = other DNA
gtcctcagagtcctgctgcc

SEQ ID NO: 1747 - DNA, 20 bp, synthetic construct
  source 1..20: mol_type = other DNA
caagttccaagcactgagac

SEQ ID NO: 1748 - DNA, 20 bp, synthetic construct
  source 1..20: mol_type = other DNA
gcaagttccaagcactgaga

SEQ ID NO: 1749 - DNA, 20 bp, synthetic construct
  source 1..20: mol_type = other DNA
caagcaagttccaagcactg

SEQ ID NO: 1750 - DNA, 20 bp, synthetic construct
  source 1..20: mol_type = other DNA
ccaagcaagttccaagcact

SEQ ID NO: 1751 - DNA, 20 bp, synthetic construct
  source 1..20: mol_type = other DNA
cttaaaccaagcaagttcca

SEQ ID NO: 1752 - DNA, 20 bp, synthetic construct
  source 1..20: mol_type = other DNA
tcttaaaccaagcaagttcc

SEQ ID NO: 1753 - DNA, 20 bp, synthetic construct
  source 1..20: mol_type = other DNA
ttcttaaaccaagcaagttc

SEQ ID NO: 1754 - DNA, 20 bp, synthetic construct
  source 1..20: mol_type = other DNA
cttcttaaaccaagcaagtt

SEQ ID NO: 1755 - DNA, 20 bp, synthetic construct
  source 1..20: mol_type = other DNA
gacttcttaaaccaagcaag

SEQ ID NO: 1756 - DNA, 20 bp, synthetic construct
  source 1..20: mol_type = other DNA
tgacttcttaaaccaagcaa

SEQ ID NO: 1757 - DNA, 20 bp, synthetic construct
  source 1..20: mol_type = other DNA
ctgacttcttaaaccaagca

SEQ ID NO: 1758 - DNA, 20 bp, synthetic construct
  source 1..20: mol_type = other DNA
tctgacttcttaaaccaagc

SEQ ID NO: 1759 - DNA, 20 bp, synthetic construct
  source 1..20: mol_type = other DNA
ttctgacttcttaaaccaag

SEQ ID NO: 1760 - DNA, 20 bp, synthetic construct
  source 1..20: mol_type = other DNA
gttctgacttcttaaaccaa

SEQ ID NO: 1761 - DNA, 20 bp, synthetic construct
  source 1..20: mol_type = other DNA
tgttctgacttcttaaacca

SEQ ID NO: 1762 - DNA, 20 bp, synthetic construct
  source 1..20: mol_type = other DNA
tgattatcacagccctcctg

SEQ ID NO: 1763 - DNA, 20 bp, synthetic construct
  source 1..20: mol_type = other DNA
gacaccaccaatccttgtgc

SEQ ID NO: 1764 - DNA, 20 bp, synthetic construct
  source 1..20: mol_type = other DNA
cagacaccaccaatccttgt

SEQ ID NO: 1765 - DNA, 20 bp, synthetic construct
  source 1..20: mol_type = other DNA
gcagacaccaccaatccttg

SEQ ID NO: 1766 - DNA, 20 bp, synthetic construct
  source 1..20: mol_type = other DNA
ggcagacaccaccaatcctt

SEQ ID NO: 1767 - DNA, 20 bp, synthetic construct
  source 1..20: mol_type = other DNA
caggcagacaccaccaatcc

SEQ ID NO: 1768 - DNA, 20 bp, synthetic construct
  source 1..20: mol_type = other DNA
tcaggcagacaccaccaatc

SEQ ID NO: 1769 - DNA, 20 bp, synthetic construct
  source 1..20: mol_type = other DNA
ttcaggcagacaccaccaat

SEQ ID NO: 1770 - DNA, 20 bp, synthetic construct
  source 1..20: mol_type = other DNA
cttcaggcagacaccaccaa

SEQ ID NO: 1771 - DNA, 20 bp, synthetic construct
  source 1..20: mol_type = other DNA
ccttcaggcagacaccacca

SEQ ID NO: 1772 - DNA, 20 bp, synthetic construct
  source 1..20: mol_type = other DNA
cccttcaggcagacaccacc

SEQ ID NO: 1773 - DNA, 20 bp, synthetic construct
  source 1..20: mol_type = other DNA
cacccttcaggcagacacca

SEQ ID NO: 1774 - DNA, 20 bp, synthetic construct
  source 1..20: mol_type = other DNA
ccacccttcaggcagacacc

SEQ ID NO: 1775 - DNA, 20 bp, synthetic construct
  source 1..20: mol_type = other DNA
gttagaattccctgtgcctc

SEQ ID NO: 1776 - DNA, 20 bp, synthetic construct
  source 1..20: mol_type = other DNA
catggtattaaagtagatcc

SEQ ID NO: 1777 - DNA, 20 bp, synthetic construct
  source 1..20: mol_type = other DNA
ttggaaacactattcatggt

SEQ ID NO: 1778 - DNA, 20 bp, synthetic construct
  source 1..20: mol_type = other DNA
cattggaaacactattcatg

SEQ ID NO: 1779 - DNA, 20 bp, synthetic construct
  source 1..20: mol_type = other DNA
gtcattggaaacactattca

SEQ ID NO: 1780 - DNA, 20 bp, synthetic construct
  source 1..20: mol_type = other DNA
tgtcattggaaacactattc

SEQ ID NO: 1781 - DNA, 20 bp, synthetic construct
  source 1..20: mol_type = other DNA
tgccattgtcactgttaatg

SEQ ID NO: 1782 - DNA, 20 bp, synthetic construct
  source 1..20: mol_type = other DNA
ttgccattgtcactgttaat

SEQ ID NO: 1783 - DNA, 20 bp, synthetic construct
  source 1..20: mol_type = other DNA
gttgccattgtcactgttaa

SEQ ID NO: 1784 - DNA, 20 bp, synthetic construct
  source 1..20: mol_type = other DNA
tttagttgccattgtcactg

SEQ ID NO: 1785 - DNA, 20 bp, synthetic construct
  source 1..20: mol_type = other DNA
ctatcatcaggatcaaacaa

SEQ ID NO: 1786 - DNA, 20 bp, synthetic construct
  source 1..20: mol_type = other DNA
gctatcatcaggatcaaaca

SEQ ID NO: 1787 - DNA, 20 bp, synthetic construct
  source 1..20: mol_type = other DNA
caagctatcatcaggatcaa

SEQ ID NO: 1788 - DNA, 20 bp, synthetic construct
  source 1..20: mol_type = other DNA
cacaagctatcatcaggatc

SEQ ID NO: 1789 - DNA, 20 bp, synthetic construct
  source 1..20: mol_type = other DNA
tcacaagctatcatcaggat

SEQ ID NO: 1790 - DNA, 20 bp, synthetic construct
  source 1..20: mol_type = other DNA
ctcacaagctatcatcagga

SEQ ID NO: 1791 - DNA, 20 bp, synthetic construct
  source 1..20: mol_type = other DNA
cactcacaagctatcatcag

SEQ ID NO: 1792 - DNA, 20 bp, synthetic construct
  source 1..20: mol_type = other DNA
tcactcacaagctatcatca

SEQ ID NO: 1793 - DNA, 20 bp, synthetic construct
  source 1..20: mol_type = other DNA
ctcactcacaagctatcatc

SEQ ID NO: 1794 - DNA, 20 bp, synthetic construct
  source 1..20: mol_type = other DNA
cctcactcacaagctatcat

SEQ ID NO: 1795 - DNA, 20 bp, synthetic construct
  source 1..20: mol_type = other DNA
gcactatcctttactggctg

SEQ ID NO: 1796 - DNA, 20 bp, synthetic construct
  source 1..20: mol_type = other DNA
ggcactatcctttactggct

SEQ ID NO: 1797 - DNA, 20 bp, synthetic construct
  source 1..20: mol_type = other DNA
tcaccaaacccagccagagc

SEQ ID NO: 1798 - DNA, 20 bp, synthetic construct
  source 1..20: mol_type = other DNA
gtcaccaaacccagccagag

SEQ ID NO: 1799 - DNA, 20 bp, synthetic construct
  source 1..20: mol_type = other DNA
tgtcaccaaacccagccaga

SEQ ID NO: 1800 - DNA, 20 bp, synthetic construct
  source 1..20: mol_type = other DNA
ttgtcaccaaacccagccag

SEQ ID NO: 1801 - DNA, 20 bp, synthetic construct
  source 1..20: mol_type = other DNA
cattgtcaccaaacccagcc

SEQ ID NO: 1802 - DNA, 20 bp, synthetic construct
  source 1..20: mol_type = other DNA
ccattgtcaccaaacccagc

SEQ ID NO: 1803 - DNA, 20 bp, synthetic construct
  source 1..20: mol_type = other DNA
gccattgtcaccaaacccag

SEQ ID NO: 1804 - DNA, 20 bp, synthetic construct
  source 1..20: mol_type = other DNA
gagccattgtcaccaaaccc

SEQ ID NO: 1805 - DNA, 20 bp, synthetic construct
  source 1..20: mol_type = other DNA
gaaagagccattgtcaccaa

SEQ ID NO: 1806 - DNA, 20 bp, synthetic construct
  source 1..20: mol_type = other DNA
ccagagaaagagccattgtc

SEQ ID NO: 1807 - DNA, 20 bp, synthetic construct
  source 1..20: mol_type = other DNA
tccagagaaagagccattgt

SEQ ID NO: 1808 - DNA, 20 bp, synthetic construct
  source 1..20: mol_type = other DNA
gtccagagaaagagccattg

SEQ ID NO: 1809 - DNA, 20 bp, synthetic construct
  source 1..20: mol_type = other DNA
tgtccagagaaagagccatt

SEQ ID NO: 1810 - DNA, 20 bp, synthetic construct
  source 1..20: mol_type = other DNA
ctgtccagagaaagagccat

SEQ ID NO: 1811 - DNA, 20 bp, synthetic construct
  source 1..20: mol_type = other DNA
caactgtccagagaaagagc

SEQ ID NO: 1812 - DNA, 20 bp, synthetic construct
  source 1..20: mol_type = other DNA
cacaactgtccagagaaaga

SEQ ID NO: 1813 - DNA, 20 bp, synthetic construct
  source 1..20: mol_type = other DNA
ccacaactgtccagagaaag

SEQ ID NO: 1814 - DNA, 20 bp, synthetic construct
  source 1..20: mol_type = other DNA
cccacaactgtccagagaaa

SEQ ID NO: 1815 - DNA, 20 bp, synthetic construct
  source 1..20: mol_type = other DNA
cacccacaactgtccagaga

SEQ ID NO: 1816 - DNA, 20 bp, synthetic construct
  source 1..20: mol_type = other DNA
gcacccacaactgtccagag

SEQ ID NO: 1817 - DNA, 20 bp, synthetic construct
  source 1..20: mol_type = other DNA
tgcacccacaactgtccaga

SEQ ID NO: 1818 - DNA, 20 bp, synthetic construct
  source 1..20: mol_type = other DNA
tcaaagccacaatgaacagg

SEQ ID NO: 1819 - DNA, 20 bp, synthetic construct
  source 1..20: mol_type = other DNA
ctcaaagccacaatgaacag

SEQ ID NO: 1820 - DNA, 20 bp, synthetic construct
  source 1..20: mol_type = other DNA
gctcaaagccacaatgaaca

SEQ ID NO: 1821 - DNA, 20 bp, synthetic construct
  source 1..20: mol_type = other DNA
cccaaagaaacccattctgg

SEQ ID NO: 1822 - DNA, 20 bp, synthetic construct
  source 1..20: mol_type = other DNA
tcccaaagaaacccattctg

SEQ ID NO: 1823 - DNA, 20 bp, synthetic construct
  source 1..20: mol_type = other DNA
ccaccagctcccaaagaaac

SEQ ID NO: 1824 - DNA, 20 bp, synthetic construct
  source 1..20: mol_type = other DNA
gaccaccagctcccaaagaa

SEQ ID NO: 1825 - DNA, 20 bp, synthetic construct
  source 1..20: mol_type = other DNA
ctgaagatataaacagctac

SEQ ID NO: 1826 - DNA, 20 bp, synthetic construct
  source 1..20: mol_type = other DNA
tcaaccaaacccatgctgtg

SEQ ID NO: 1827 - DNA, 20 bp, synthetic construct
  source 1..20: mol_type = other DNA
ttcaaccaaacccatgctgt

SEQ ID NO: 1828 - DNA, 20 bp, synthetic construct
  source 1..20: mol_type = other DNA
cttcaaccaaacccatgctg

SEQ ID NO: 1829 - DNA, 20 bp, synthetic construct
  source 1..20: mol_type = other DNA
ccttcaaccaaacccatgct

SEQ ID NO: 1830 - DNA, 20 bp, synthetic construct
  source 1..20: mol_type = other DNA
tgttcatgtcaagtccagga

SEQ ID NO: 1831 - DNA, 20 bp, synthetic construct
  source 1..20: mol_type = other DNA
gtgttcatgtcaagtccagg

SEQ ID NO: 1832 - DNA, 20 bp, synthetic construct
  source 1..20: mol_type = other DNA
tagtgttcatgtcaagtcca

SEQ ID NO: 1833 - DNA, 20 bp, synthetic construct
  source 1..20: mol_type = other DNA
ttagtgttcatgtcaagtcc

SEQ ID NO: 1834 - DNA, 20 bp, synthetic construct
  source 1..20: mol_type = other DNA
cttagtgttcatgtcaagtc

SEQ ID NO: 1835 - DNA, 20 bp, synthetic construct
  source 1..20: mol_type = other DNA
gcttagtgttcatgtcaagt

SEQ ID NO: 1836 - DNA, 20 bp, synthetic construct
  source 1..20: mol_type = other DNA
cccagacaagactaaacaga

SEQ ID NO: 1837 - DNA, 20 bp, synthetic construct
  source 1..20: mol_type = other DNA
gcccagacaagactaaacag

SEQ ID NO: 1838 - DNA, 20 bp, synthetic construct
  source 1..20: mol_type = other DNA
cttgaaagtctgaaggtggg

SEQ ID NO: 1839 - DNA, 20 bp, synthetic construct
  source 1..20: mol_type = other DNA
tcttgaaagtctgaaggtgg

SEQ ID NO: 1840 - DNA, 20 bp, synthetic construct
  source 1..20: mol_type = other DNA
ctcttgaaagtctgaaggtg

SEQ ID NO: 1841 - DNA, 20 bp, synthetic construct
  source 1..20: mol_type = other DNA
gctcttgaaagtctgaaggt

SEQ ID NO: 1842 - DNA, 20 bp, synthetic construct
  source 1..20: mol_type = other DNA
gcagccaactacaagggacc

SEQ ID NO: 1843 - DNA, 20 bp, synthetic construct
  source 1..20: mol_type = other DNA
ctgactgtatttgaattcca

SEQ ID NO: 1844 - DNA, 20 bp, synthetic construct
  source 1..20: mol_type = other DNA
gctgactgtatttgaattcc

SEQ ID NO: 1845 - DNA, 20 bp, synthetic construct
  source 1..20: mol_type = other DNA
gagctgactgtatttgaatt

SEQ ID NO: 1846 - DNA, 20 bp, synthetic construct
  source 1..20: mol_type = other DNA
gaagagctgactgtatttga

SEQ ID NO: 1847 - DNA, 20 bp, synthetic construct
  source 1..20: mol_type = other DNA
caagaagagctgactgtatt

SEQ ID NO: 1848 - DNA, 20 bp, synthetic construct
  source 1..20: mol_type = other DNA
tcaagaagagctgactgtat

SEQ ID NO: 1849 - DNA, 20 bp, synthetic construct
  source 1..20: mol_type = other DNA
ctcaagaagagctgactgta

SEQ ID NO: 1850 - DNA, 20 bp, synthetic construct
  source 1..20: mol_type = other DNA
tactgtacctccaatacacc

SEQ ID NO: 1851 - DNA, 20 bp, synthetic construct
  source 1..20: mol_type = other DNA
ttactgtacctccaatacac

SEQ ID NO: 1852 - DNA, 20 bp, synthetic construct
  source 1..20: mol_type = other DNA
cattactgtacctccaatac

SEQ ID NO: 1853 - DNA, 20 bp, synthetic construct
  source 1..20: mol_type = other DNA
tcattactgtacctccaata

SEQ ID NO: 1854 - DNA, 20 bp, synthetic construct
  source 1..20: mol_type = other DNA
catcattactgtacctccaa

SEQ ID NO: 1855 - DNA, 20 bp, synthetic construct
  source 1..20: mol_type = other DNA
cacacatcattactgtacct

SEQ ID NO: 1856 - DNA, 20 bp, synthetic construct
  source 1..20: mol_type = other DNA
caaacacacatcattactgt

SEQ ID NO: 1857 - DNA, 20 bp, synthetic construct
  source 1..20: mol_type = other DNA
gacattcaaacacacatcat

SEQ ID NO: 1858 - DNA, 20 bp, synthetic construct
  source 1..20: mol_type = other DNA
tgacattcaaacacacatca

SEQ ID NO: 1859 - DNA, 20 bp, synthetic construct
  source 1..20: mol_type = other DNA
gtgacattcaaacacacatc

SEQ ID NO: 1860 - DNA, 20 bp, synthetic construct
  source 1..20: mol_type = other DNA
ggtgacattcaaacacacat

SEQ ID NO: 1861 - DNA, 20 bp, synthetic construct
  source 1..20: mol_type = other DNA
ttagacatacagaaccactg

SEQ ID NO: 1862 - DNA, 20 bp, synthetic construct
  source 1..20: mol_type = other DNA
gttagacatacagaaccact

SEQ ID NO: 1863 - DNA, 20 bp, synthetic construct
  source 1..20: mol_type = other DNA
gagttagacatacagaacca

SEQ ID NO: 1864 - DNA, 20 bp, synthetic construct
  source 1..20: mol_type = other DNA
tagagttagacatacagaac

SEQ ID NO: 1865 - DNA, 20 bp, synthetic construct
  source 1..20: mol_type = other DNA
cagatagagttagacataca

SEQ ID NO: 1866 - DNA, 20 bp, synthetic construct
  source 1..20: mol_type = other DNA
tcagatagagttagacatac

SEQ ID NO: 1867 - DNA, 20 bp, synthetic construct
  source 1..20: mol_type = other DNA
gcccatgcacaccctcttgg

SEQ ID NO: 1868 - DNA, 20 bp, synthetic construct
  source 1..20: mol_type = other DNA
catgaagctgttagaggtaa

SEQ ID NO: 1869 - DNA, 20 bp, synthetic construct
  source 1..20: mol_type = other DNA
gtggtgtcattcagtcatga

SEQ ID NO: 1870 - DNA, 20 bp, synthetic construct
  source 1..20: mol_type = other DNA
tgtggtgtcattcagtcatg

SEQ ID NO: 1871 - DNA, 20 bp, synthetic construct
  source 1..20: mol_type = other DNA
ttgtggtgtcattcagtcat

SEQ ID NO: 1872 - DNA, 20 bp, synthetic construct
  source 1..20: mol_type = other DNA
ggttgtggtgtcattcagtc

SEQ ID NO: 1873 - DNA, 20 bp, synthetic construct
  source 1..20: mol_type = other DNA
cagtggttgtggtgtcattc

SEQ ID NO: 1874 - DNA, 20 bp, synthetic construct
  source 1..20: mol_type = other DNA
gcctctaattctagttgata

SEQ ID NO: 1875 - DNA, 20 bp, synthetic construct
  source 1..20: mol_type = other DNA
ttaagttcaacatggaaagc

SEQ ID NO: 1876 - DNA, 20 bp, synthetic construct
  source 1..20: mol_type = other DNA
gcctcagcactctttatagg

SEQ ID NO: 1877 - DNA, 20 bp, synthetic construct
  source 1..20: mol_type = other DNA
cagcctcagcactctttata

SEQ ID NO: 1878 - DNA, 20 bp, synthetic construct
  source 1..20: mol_type = other DNA
tattagttcccaagaaagct

SEQ ID NO: 1879 - DNA, 20 bp, synthetic construct
  source 1..20: mol_type = other DNA
ctattagttcccaagaaagc

SEQ ID NO: 1880 - DNA, 20 bp, synthetic construct
  source 1..20: mol_type = other DNA
tctattagttcccaagaaag

SEQ ID NO: 1881 - DNA, 20 bp, synthetic construct
  source 1..20: mol_type = other DNA
ctctattagttcccaagaaa

SEQ ID NO: 1882 - DNA, 20 bp, synthetic construct
  source 1..20: mol_type = other DNA
tacatagcaagacctccctc

SEQ ID NO: 1883 - DNA, 20 bp, synthetic construct
  source 1..20: mol_type = other DNA
ctacatagcaagacctccct

SEQ ID NO: 1884 - DNA, 20 bp, synthetic construct
  source 1..20: mol_type = other DNA
cagatcctttaagaaacaag

SEQ ID NO: 1885 - DNA, 20 bp, synthetic construct
  source 1..20: mol_type = other DNA
ccagatcctttaagaaacaa

SEQ ID NO: 1886 - DNA, 20 bp, synthetic construct
  source 1..20: mol_type = other DNA
tccagatcctttaagaaaca

SEQ ID NO: 1887 - DNA, 20 bp, synthetic construct
  source 1..20: mol_type = other DNA
gtccagatcctttaagaaac

SEQ ID NO: 1888 - DNA, 20 bp, synthetic construct
  source 1..20: mol_type = other DNA
tcccatagtgacctaaagtc

SEQ ID NO: 1889 - DNA, 20 bp, synthetic construct
  source 1..20: mol_type = other DNA
ctcccatagtgacctaaagt

SEQ ID NO: 1890 - DNA, 20 bp, synthetic construct
  source 1..20: mol_type = other DNA
gactcccatagtgacctaaa

SEQ ID NO: 1891 - DNA, 20 bp, synthetic construct
  source 1..20: mol_type = other DNA
tgatttaagcagaggtggac

SEQ ID NO: 1892 - DNA, 20 bp, synthetic construct
  source 1..20: mol_type = other DNA
tgtgatttaagcagaggtgg

SEQ ID NO: 1893 - DNA, 20 bp, synthetic construct
  source 1..20: mol_type = other DNA
gtgtgatttaagcagaggtg

SEQ ID NO: 1894 - DNA, 20 bp, synthetic construct
  source 1..20: mol_type = other DNA
ctgctctcaaacttgctggg

SEQ ID NO: 1895 - DNA, 20 bp, synthetic construct
  source 1..20: mol_type = other DNA
gctgctctcaaacttgctgg

SEQ ID NO: 1896 - DNA, 20 bp, synthetic construct
  source 1..20: mol_type = other DNA
tgctgctctcaaacttgctg

SEQ ID NO: 1897 - DNA, 20 bp, synthetic construct
  source 1..20: mol_type = other DNA
gtgctgctctcaaacttgct

SEQ ID NO: 1898 - DNA, 20 bp, synthetic construct
  source 1..20: mol_type = other DNA
ggctgcacttcactttaggg

SEQ ID NO: 1899 - DNA, 20 bp, synthetic construct
  source 1..20: mol_type = other DNA
tggctgcacttcactttagg

SEQ ID NO: 1900 - DNA, 20 bp, synthetic construct
  source 1..20: mol_type = other DNA
ctggctgcacttcactttag

SEQ ID NO: 1901 - DNA, 20 bp, synthetic construct
  source 1..20: mol_type = other DNA
ttgaataactaccttggctg

SEQ ID NO: 1902 - DNA, 20 bp, synthetic construct
  source 1..20: mol_type = other DNA
tttgaataactaccttggct

SEQ ID NO: 1903 - DNA, 20 bp, synthetic construct
  source 1..20: mol_type = other DNA
ttcctgagcaagccatcttg

SEQ ID NO: 1904 - DNA, 20 bp, synthetic construct
  source 1..20: mol_type = other DNA
cttcctgagcaagccatctt

SEQ ID NO: 1905 - DNA, 20 bp, synthetic construct
  source 1..20: mol_type = other DNA
tcttcctgagcaagccatct

SEQ ID NO: 1906 - DNA, 20 bp, synthetic construct
  source 1..20: mol_type = other DNA
ttcttcctgagcaagccatc

SEQ ID NO: 1907 - DNA, 20 bp, synthetic construct
  source 1..20: mol_type = other DNA
tttcttcctgagcaagccat

SEQ ID NO: 1908 - DNA, 20 bp, synthetic construct
  source 1..20: mol_type = other DNA
tgcatttagagacacagaga

SEQ ID NO: 1909 - DNA, 20 bp, synthetic construct
  source 1..20: mol_type = other DNA
ttgcatttagagacacagag

SEQ ID NO: 1910 - DNA, 20 bp, synthetic construct
  source 1..20: mol_type = other DNA
tttgcatttagagacacaga

SEQ ID NO: 1911 - DNA, 20 bp, synthetic construct
  source 1..20: mol_type = other DNA
ctttgcatttagagacacag

SEQ ID NO: 1912 - DNA, 20 bp, synthetic construct
  source 1..20: mol_type = other DNA
gttgaaatgtcccatgtttg

SEQ ID NO: 1913 - DNA, 20 bp, synthetic construct
  source 1..20: mol_type = other DNA
tgttgaaatgtcccatgttt

SEQ ID NO: 1914 - DNA, 20 bp, synthetic construct
  source 1..20: mol_type = other DNA
ctgttgaaatgtcccatgtt

SEQ ID NO: 1915 - DNA, 20 bp, synthetic construct
  source 1..20: mol_type = other DNA
tctgttgaaatgtcccatgt

SEQ ID NO: 1916 - DNA, 20 bp, synthetic construct
  source 1..20: mol_type = other DNA
gaatctgttgaaatgtccca

SEQ ID NO: 1917 - DNA, 20 bp, synthetic construct
  source 1..20: mol_type = other DNA
tgaatctgttgaaatgtccc

SEQ ID NO: 1918 - DNA, 20 bp, synthetic construct
  source 1..20: mol_type = other DNA
ttgaatctgttgaaatgtcc

SEQ ID NO: 1919 - DNA, 20 bp, synthetic construct
  source 1..20: mol_type = other DNA
cttgaatctgttgaaatgtc

SEQ ID NO: 1920 - DNA, 20 bp, synthetic construct
  source 1..20: mol_type = other DNA
gcttgaatctgttgaaatgt

SEQ ID NO: 1921 - DNA, 20 bp, synthetic construct
  source 1..20: mol_type = other DNA
ggcttgaatctgttgaaatg

SEQ ID NO: 1922 - DNA, 20 bp, synthetic construct
  source 1..20: mol_type = other DNA
tggcttgaatctgttgaaat

SEQ ID NO: 1923 - DNA, 20 bp, synthetic construct
  source 1..20: mol_type = other DNA
ttggcttgaatctgttgaaa

SEQ ID NO: 1924 - DNA, 20 bp, synthetic construct
  source 1..20: mol_type = other DNA
ccttggcttgaatctgttga

SEQ ID NO: 1925 - DNA, 20 bp, synthetic construct
  source 1..20: mol_type = other DNA
tccttggcttgaatctgttg

SEQ ID NO: 1926 - DNA, 20 bp, synthetic construct
  source 1..20: mol_type = other DNA
taaagactatgattctccca

SEQ ID NO: 1927 - DNA, 20 bp, synthetic construct
  source 1..20: mol_type = other DNA
ttaaagactatgattctccc

SEQ ID NO: 1928 - DNA, 20 bp, synthetic construct
  source 1..20: mol_type = other DNA
gtctaaatcctgccttattg

SEQ ID NO: 1929 - DNA, 20 bp, synthetic construct
  source 1..20: mol_type = other DNA
caatgtctaaatcctgcctt

SEQ ID NO: 1930 - DNA, 20 bp, synthetic construct
  source 1..20: mol_type = other DNA
ccaatgtctaaatcctgcct

SEQ ID NO: 1931 - DNA, 20 bp, synthetic construct
  source 1..20: mol_type = other DNA
taccaatgtctaaatcctgc

SEQ ID NO: 1932 - DNA, 20 bp, synthetic construct
  source 1..20: mol_type = other DNA
ttaccaatgtctaaatcctg

SEQ ID NO: 1933 - DNA, 20 bp, synthetic construct
  source 1..20: mol_type = other DNA
gttaccaatgtctaaatcct

SEQ ID NO: 1934 - DNA, 20 bp, synthetic construct
  source 1..20: mol_type = other DNA
cagttaccaatgtctaaatc

SEQ ID NO: 1935 - DNA, 20 bp, synthetic construct
  source 1..20: mol_type = other DNA
gtcagttaccaatgtctaaa

SEQ ID NO: 1936 - DNA, 20 bp, synthetic construct
  source 1..20: mol_type = other DNA
gatagtcagttaccaatgtc

SEQ ID NO: 1937 - DNA, 20 bp, synthetic construct
  source 1..20: mol_type = other DNA
ggatagtcagttaccaatgt

SEQ ID NO: 1938 - DNA, 20 bp, synthetic construct
  source 1..20: mol_type = other DNA
gggatagtcagttaccaatg

SEQ ID NO: 1939 - DNA, 20 bp, synthetic construct
  source 1..20: mol_type = other DNA
taaacatgggatagtcagtt

SEQ ID NO: 1940 - DNA, 20 bp, synthetic construct
  source 1..20: mol_type = other DNA
caaataaacatgggatagtc

SEQ ID NO: 1941 - DNA, 20 bp, synthetic construct
  source 1..20: mol_type = other DNA
gtacttcaaataaacatggg

SEQ ID NO: 1942 - DNA, 20 bp, synthetic construct
  source 1..20: mol_type = other DNA
ggtacttcaaataaacatgg

SEQ ID NO: 1943 - DNA, 20 bp, synthetic construct
  source 1..20: mol_type = other DNA
tttcacactgagacaggttt

SEQ ID NO: 1944 - DNA, 20 bp, synthetic construct
  source 1..20: mol_type = other DNA
ttggactagagatgcttaag

SEQ ID NO: 1945 - DNA, 20 bp, synthetic construct
  source 1..20: mol_type = other DNA
tttggactagagatgcttaa

SEQ ID NO: 1946 - DNA, 20 bp, synthetic construct
  source 1..20: mol_type = other DNA
gtttggactagagatgctta

SEQ ID NO: 1947 - DNA, 20 bp, synthetic construct
  source 1..20: mol_type = other DNA
ggattcagcccaatgatgtc

SEQ ID NO: 1948 - DNA, 20 bp, synthetic construct
  source 1..20: mol_type = other DNA
ccctctaaattctcagatgc

SEQ ID NO: 1949 - DNA, 20 bp, synthetic construct
  source 1..20: mol_type = other DNA
taccctctaaattctcagat

SEQ ID NO: 1950 - DNA, 20 bp, synthetic construct
  source 1..20: mol_type = other DNA
ttaccctctaaattctcaga

SEQ ID NO: 1951 - DNA, 20 bp, synthetic construct
  source 1..20: mol_type = other DNA
ctaatattctagcttggtgt

SEQ ID NO: 1952 - DNA, 20 bp, synthetic construct
  source 1..20: mol_type = other DNA
cctaatattctagcttggtg

SEQ ID NO: 1953 - DNA, 20 bp, synthetic construct
  source 1..20: mol_type = other DNA
gcctaatattctagcttggt

SEQ ID NO: 1954 - DNA, 20 bp, synthetic construct
  source 1..20: mol_type = other DNA
gtggtaatgacttcagaatc

SEQ ID NO: 1955 - DNA, 20 bp, synthetic construct
  source 1..20: mol_type = other DNA
gacaggcacattactcagaa

SEQ ID NO: 1956 - DNA, 20 bp, synthetic construct
  source 1..20: mol_type = other DNA
caagacaggcacattactca

SEQ ID NO: 1957 - DNA, 20 bp, synthetic construct
  source 1..20: mol_type = other DNA
tacaagacaggcacattact

SEQ ID NO: 1958 - DNA, 20 bp, synthetic construct
  source 1..20: mol_type = other DNA
ctacaagacaggcacattac

SEQ ID NO: 1959 - DNA, 20 bp, synthetic construct
  source 1..20: mol_type = other DNA
tctacaagacaggcacatta

SEQ ID NO: 1960 - DNA, 20 bp, synthetic construct
  source 1..20: mol_type = other DNA
cctaaataaagctggagtga

SEQ ID NO: 1961 - DNA, 20 bp, synthetic construct
  source 1..20: mol_type = other DNA
gacctaaataaagctggagt

SEQ ID NO: 1962 - DNA, 20 bp, synthetic construct
  source 1..20: mol_type = other DNA
tgacctaaataaagctggag

SEQ ID NO: 1963 - DNA, 20 bp, synthetic construct
  source 1..20: mol_type = other DNA
taacagcccagcaccttgta

SEQ ID NO: 1964 - DNA, 20 bp, synthetic construct
  source 1..20: mol_type = other DNA
ttaacagcccagcaccttgt

SEQ ID NO: 1965 - DNA, 20 bp, synthetic construct
  source 1..20: mol_type = other DNA
cttaacagcccagcaccttg

SEQ ID NO: 1966 - DNA, 20 bp, synthetic construct
  source 1..20: mol_type = other DNA
ccttaacagcccagcacctt

SEQ ID NO: 1967 - DNA, 20 bp, synthetic construct
  source 1..20: mol_type = other DNA
caacctgctcattgttactg

SEQ ID NO: 1968 - DNA, 20 bp, synthetic construct
  source 1..20: mol_type = other DNA
gcaacctgctcattgttact

SEQ ID NO: 1969 - DNA, 16 bp, synthetic construct
  source 1..16: mol_type = other DNA
ctaggacaatcatggg

SEQ ID NO: 1970 - DNA, 16 bp, synthetic construct
  source 1..16: mol_type = other DNA
gcatactcaatagctc

SEQ ID NO: 1971 - DNA, 16 bp, synthetic construct
  source 1..16: mol_type = other DNA
tggcatactcaatagc

SEQ ID NO: 1972 - DNA, 16 bp, synthetic construct
  source 1..16: mol_type = other DNA
tgacttaataggaggc

SEQ ID NO: 1973 - DNA, 16 bp, synthetic construct
  source 1..16: mol_type = other DNA
gttaggctcttcaacc

SEQ ID NO: 1974 - DNA, 16 bp, synthetic construct
  source 1..16: mol_type = other DNA
ggtcctatctctaagc

SEQ ID NO: 1975 - DNA, 16 bp, synthetic construct
  source 1..16: mol_type = other DNA
gagtgtctccaagggt

SEQ ID NO: 1976 - DNA, 16 bp, synthetic construct
  source 1..16: mol_type = other DNA
caaacctttgtagtac

SEQ ID NO: 1977 - DNA, 16 bp, synthetic construct
  source 1..16: mol_type = other DNA
gtcaaacctttgtagt

SEQ ID NO: 1978 - DNA, 16 bp, synthetic construct
  source 1..16: mol_type = other DNA
caattagcagtaagcc

SEQ ID NO: 1979 - DNA, 16 bp, synthetic construct
  source 1..16: mol_type = other DNA
gtgtgctctacaggac

SEQ ID NO: 1980 - DNA, 16 bp, synthetic construct
  source 1..16: mol_type = other DNA
gagctatctacttaac

SEQ ID NO: 1981 - DNA, 16 bp, synthetic construct
  source 1..16: mol_type = other DNA
tagtattggatttgcc

SEQ ID NO: 1982 - DNA, 16 bp, synthetic construct
  source 1..16: mol_type = other DNA
tagcagttggtgatct

SEQ ID NO: 1983 - DNA, 16 bp, synthetic construct
  source 1..16: mol_type = other DNA
gactgttgattatcac

SEQ ID NO: 1984 - DNA, 16 bp, synthetic construct
  source 1..16: mol_type = other DNA
gacatggacttacctc

SEQ ID NO: 1985 - DNA, 16 bp, synthetic construct
  source 1..16: mol_type = other DNA
tgggtggttaggcttc

SEQ ID NO: 1986 - DNA, 16 bp, synthetic construct
  source 1..16: mol_type = other DNA
gtgggtggttaggctt

SEQ ID NO: 1987 - DNA, 16 bp, synthetic construct
  source 1..16: mol_type = other DNA
ccagattagtgatgcc

SEQ ID NO: 1988 - DNA, 16 bp, synthetic construct
  source 1..16: mol_type = other DNA
cccagattagtgatgc

SEQ ID NO: 1989 - DNA, 16 bp, synthetic construct
  source 1..16: mol_type = other DNA
gacccagattagtgat

SEQ ID NO: 1990 - DNA, 16 bp, synthetic construct
  source 1..16: mol_type = other DNA
ggacccagattagtga

SEQ ID NO: 1991 - DNA, 16 bp, synthetic construct
  source 1..16: mol_type = other DNA
cctagatgcactccaa

SEQ ID NO: 1992 - DNA, 16 bp, synthetic construct
  source 1..16: mol_type = other DNA
tcctagatgcactcca

SEQ ID NO: 1993 - DNA, 16 bp, synthetic construct
  source 1..16: mol_type = other DNA
gccaaagtgtaccctt

SEQ ID NO: 1994 - DNA, 16 bp, synthetic construct
  source 1..16: mol_type = other DNA
ttgccaaagtgtaccc

SEQ ID NO: 1995 - DNA, 16 bp, synthetic construct
  source 1..16: mol_type = other DNA
cattagagttagggtg

SEQ ID NO: 1996 - DNA, 16 bp, synthetic construct
  source 1..16: mol_type = other DNA
cacattagagttaggg

SEQ ID NO: 1997 - DNA, 16 bp, synthetic construct
  source 1..16: mol_type = other DNA
ttaagggtgctggtct

SEQ ID NO: 1998 - DNA, 16 bp, synthetic construct
  source 1..16: mol_type = other DNA
cctatagcactccata

SEQ ID NO: 1999 - DNA, 16 bp, synthetic construct
  source 1..16: mol_type = other DNA
gttggtccctatcaaa

SEQ ID NO: 2000 - DNA, 16 bp, synthetic construct
  source 1..16: mol_type = other DNA
tagttggtccctatca

SEQ ID NO: 2001 - DNA, 16 bp, synthetic construct
  source 1..16: mol_type = other DNA
gtctagttggtcccta

SEQ ID NO: 2002 - DNA, 16 bp, synthetic construct
  source 1..16: mol_type = other DNA
ggaactagccatcagg

SEQ ID NO: 2003 - DNA, 16 bp, synthetic construct
  source 1..16: mol_type = other DNA
gctcaattcccataac

SEQ ID NO: 2004 - DNA, 16 bp, synthetic construct
  source 1..16: mol_type = other DNA
gtgatactaccttgga

SEQ ID NO: 2005 - DNA, 16 bp, synthetic construct
  source 1..16: mol_type = other DNA
gctttgtgatactacc

SEQ ID NO: 2006 - DNA, 16 bp, synthetic construct
  source 1..16: mol_type = other DNA
gtcctagattacatcc

SEQ ID NO: 2007 - DNA, 16 bp, synthetic construct
  source 1..16: mol_type = other DNA
gcaagtcctagattac

SEQ ID NO: 2008 - DNA, 16 bp, synthetic construct
  source 1..16: mol_type = other DNA
ggtcccttaaatcata

SEQ ID NO: 2009 - DNA, 16 bp, synthetic construct
  source 1..16: mol_type = other DNA
gtaaggatattgccct

SEQ ID NO: 2010 - DNA, 16 bp, synthetic construct
  source 1..16: mol_type = other DNA
  modified_base 1..3: mod_base = OTHER; note = locked nucleic acid
  modified_base 15..16: mod_base = OTHER; note = locked nucleic acid
  modified_base 1..16: mod_base = OTHER; note = phosphorothioate linkage
  misc_feature 1..3: note = RNA
  misc_feature 4..14: note = DNA
  misc_feature 15..16: note = RNA
agtgctacccacaagg

SEQ ID NO: 2011 - DNA, 16 bp, synthetic construct
  source 1..16: mol_type = other DNA
  modified_base 1..3: mod_base = OTHER; note = locked nucleic acid
  modified_base 15..16: mod_base = OTHER; note = locked nucleic acid
  modified_base 1..16: mod_base = OTHER; note = phosphorothioate linkage
  misc_feature 1..3: note = RNA
  misc_feature 4..14: note = DNA
  misc_feature 15..16: note = RNA
ggacatgctattgatg

SEQ ID NO: 2012 - DNA, 16 bp, synthetic construct
  source 1..16: mol_type = other DNA
  modified_base 1..3: mod_base = OTHER; note = locked nucleic acid
  modified_base 15..16: mod_base = OTHER; note = locked nucleic acid
  modified_base 1..16: mod_base = OTHER; note = phosphorothioate linkage
  misc_feature 1..3: note = RNA
  misc_feature 4..14: note = DNA
  misc_feature 15..16: note = RNA
ttgatgctaacagacc

SEQ ID NO: 2013 - DNA, 16 bp, synthetic construct
  source 1..16: mol_type = other DNA
  modified_base 1..3: mod_base = OTHER; note = locked nucleic acid
  modified_base 15..16: mod_base = OTHER; note = locked nucleic acid
  modified_base 1..16: mod_base = OTHER; note = phosphorothioate linkage
  misc_feature 1..3: note = RNA
  misc_feature 4..14: note = DNA
  misc_feature 15..16: note = RNA
ggactacaccttgaca

SEQ ID NO: 2014 - DNA, 16 bp, synthetic construct
  source 1..16: mol_type = other DNA
  modified_base 1..3: mod_base = OTHER; note = locked nucleic acid
  modified_base 15..16: mod_base = OTHER; note = locked nucleic acid
  modified_base 1..16: mod_base = OTHER; note = phosphorothioate linkage
  misc_feature 1..3: note = RNA
  misc_feature 4..14: note = DNA
  misc_feature 15..16: note = RNA
ttagacctagactgct

SEQ ID NO: 2015 - DNA, 16 bp, synthetic construct
  source 1..16: mol_type = other DNA
  modified_base 1..3: mod_base = OTHER; note = locked nucleic acid
  modified_base 15..16: mod_base = OTHER; note = locked nucleic acid
  modified_base 1..16: mod_base = OTHER; note = phosphorothioate linkage
  misc_feature 1..3: note = RNA
  misc_feature 4..14: note = DNA
  misc_feature 15..16: note = RNA
gccttagatcagtcct

SEQ ID NO: 2016 - DNA, 16 bp, synthetic construct
  source 1..16: mol_type = other DNA
  modified_base 1..3: mod_base = OTHER; note = locked nucleic acid
  modified_base 15..16: mod_base = OTHER; note = locked nucleic acid
  modified_base 1..16: mod_base = OTHER; note = phosphorothioate linkage
  misc_feature 1..3: note = RNA
  misc_feature 4..14: note = DNA
  misc_feature 15..16: note = RNA
ccattagagtagtagg

SEQ ID NO: 2017 - DNA, 16 bp, synthetic construct
  source 1..16: mol_type = other DNA
  modified_base 1..3: mod_base = OTHER; note = locked nucleic acid
  modified_base 15..16: mod_base = OTHER; note = locked nucleic acid
  modified_base 1..16: mod_base = OTHER; note = phosphorothioate linkage
  misc_feature 1..3: note = RNA
  misc_feature 4..14: note = DNA
  misc_feature 15..16: note = RNA
gttaccagacctctac

SEQ ID NO: 2018 - DNA, 16 bp, synthetic construct
  source 1..16: mol_type = other DNA
  modified_base 1..3: mod_base = OTHER; note = locked nucleic acid
  modified_base 15..16: mod_base = OTHER; note = locked nucleic acid
  modified_base 1..16: mod_base = OTHER; note = phosphorothioate linkage
  misc_feature 1..3: note = RNA
  misc_feature 4..14: note = DNA
  misc_feature 15..16: note = RNA
gaaaccttagtgtgtc

SEQ ID NO: 2019 - DNA, 16 bp, synthetic construct
  source 1..16: mol_type = other DNA
gtcctaacagagtaac

SEQ ID NO: 2020 - DNA, 16 bp, synthetic construct
  source 1..16: mol_type = other DNA
ttgagctactaatgcc

SEQ ID NO: 2021 - DNA, 16 bp, synthetic construct
  source 1..16: mol_type = other DNA
gttgagctactaatgc

SEQ ID NO: 2022 - DNA, 16 bp, synthetic construct
  source 1..16: mol_type = other DNA
tgttgagctactaatg

SEQ ID NO: 2023 - DNA, 16 bp, synthetic construct
  source 1..16: mol_type = other DNA
tcatatcatgttgagc

SEQ ID NO: 2024 - DNA, 16 bp, synthetic construct
  source 1..16: mol_type = other DNA
gtcatatcatgttgag

SEQ ID NO: 2025 - DNA, 16 bp, synthetic construct
  source 1..16: mol_type = other DNA
gaactacttgcctact

SEQ ID NO: 2026 - DNA, 16 bp, synthetic construct
  source 1..16: mol_type = other DNA
cctcttgaccactagg

SEQ ID NO: 2027 - DNA, 16 bp, synthetic construct
  source 1..16: mol_type = other DNA
gcctcttgaccactag

SEQ ID NO: 2028 - DNA, 16 bp, synthetic construct
  source 1..16: mol_type = other DNA
gtagatcaagtgtctt

SEQ ID NO: 2029 - DNA, 16 bp, synthetic construct
  source 1..16: mol_type = other DNA
gagtagatcaagtgtc

SEQ ID NO: 2030 - DNA, 16 bp, synthetic construct
  source 1..16: mol_type = other DNA
gttagctgtaaactac

SEQ ID NO: 2031 - DNA, 16 bp, synthetic construct
  source 1..16: mol_type = other DNA
gcatagactcacctgt

SEQ ID NO: 2032 - DNA, 16 bp, synthetic construct
  source 1..16: mol_type = other DNA
ggtgaacttagtactt

SEQ ID NO: 2033 - DNA, 16 bp, synthetic construct
  source 1..16: mol_type = other DNA
tggtgaacttagtact

SEQ ID NO: 2034 - DNA, 16 bp, synthetic construct
  source 1..16: mol_type = other DNA
ctggtgaacttagtac

SEQ ID NO: 2035 - DNA, 16 bp, synthetic construct
  source 1..16: mol_type = other DNA
gatctggagggcttaa

SEQ ID NO: 2036 - DNA, 16 bp, synthetic construct
  source 1..16: mol_type = other DNA
gatatgcctgatccag

SEQ ID NO: 2037 - DNA, 16 bp, synthetic construct
  source 1..16: mol_type = other DNA
gcctagctttaactat

SEQ ID NO: 2038 - DNA, 16 bp, synthetic construct
  source 1..16: mol_type = other DNA
agcctagctttaacta

SEQ ID NO: 2039 - DNA, 16 bp, synthetic construct
  source 1..16: mol_type = other DNA
acacccttaatgagac

SEQ ID NO: 2040 - DNA, 16 bp, synthetic construct
  source 1..16: mol_type = other DNA
gacacccttaatgaga

SEQ ID NO: 2041 - DNA, 16 bp, synthetic construct
  source 1..16: mol_type = other DNA
ggacacccttaatgag

SEQ ID NO: 2042 - DNA, 16 bp, synthetic construct
  source 1..16: mol_type = other DNA
aggacacccttaatga

SEQ ID NO: 2043 - DNA, 16 bp, synthetic construct
  source 1..16: mol_type = other DNA
ctaatgatgtgaggac

SEQ ID NO: 2044 - DNA, 16 bp, synthetic construct
  source 1..16: mol_type = other DNA
tattatagatcccagc

SEQ ID NO: 2045 - DNA, 16 bp, synthetic construct
  source 1..16: mol_type = other DNA
attaggtgctttaggg

SEQ ID NO: 2046 - DNA, 16 bp, synthetic construct
  source 1..16: mol_type = other DNA
gctggtggttagatat

SEQ ID NO: 2047 - DNA, 16 bp, synthetic construct
  source 1..16: mol_type = other DNA
agtccctacaagatag

SEQ ID NO: 2048 - DNA, 16 bp, synthetic construct
  source 1..16: mol_type = other DNA
gcagtccctacaagat

SEQ ID NO: 2049 - DNA, 16 bp, synthetic construct
  source 1..16: mol_type = other DNA
gagcagtccctacaag

SEQ ID NO: 2050 - DNA, 16 bp, synthetic construct
  source 1..16: mol_type = other DNA
tgtaagctcataaggc

SEQ ID NO: 2051 - DNA, 16 bp, synthetic construct
  source 1..16: mol_type = other DNA
atcagggtagctttag

SEQ ID NO: 2052 - DNA, 16 bp, synthetic construct
  source 1..16: mol_type = other DNA
gtcatcagggtagctt

SEQ ID NO: 2053 - DNA, 16 bp, synthetic construct
  source 1..16: mol_type = other DNA
tgttagaaccctactt

SEQ ID NO: 2054 - DNA, 16 bp, synthetic construct
  source 1..16: mol_type = other DNA
ttgttagaaccctact

SEQ ID NO: 2055 - DNA, 16 bp, synthetic construct
  source 1..16: mol_type = other DNA
gttgttagaaccctac

SEQ ID NO: 2056 - DNA, 16 bp, synthetic construct
  source 1..16: mol_type = other DNA
tgttgttagaacccta

SEQ ID NO: 2057 - DNA, 16 bp, synthetic construct
  source 1..16: mol_type = other DNA
attgttgttagaaccc

SEQ ID NO: 2058 - DNA, 16 bp, synthetic construct
  source 1..16: mol_type = other DNA
ggagttgcatagcatg

SEQ ID NO: 2059 - DNA, 16 bp, synthetic construct
  source 1..16: mol_type = other DNA
tggagttgcatagcat

SEQ ID NO: 2060 - DNA, 16 bp, synthetic construct
  source 1..16: mol_type = other DNA
gagttacattaaccac

SEQ ID NO: 2061 - DNA, 16 bp, synthetic construct
  source 1..16: mol_type = other DNA
gggagttacattaacc

SEQ ID NO: 2062 - DNA, 16 bp, synthetic construct
  source 1..16: mol_type = other DNA
gtagcccagctcttta

SEQ ID NO: 2063 - DNA, 16 bp, synthetic construct
  source 1..16: mol_type = other DNA
tggaccttgagttgtc

SEQ ID NO: 2064 - DNA, 16 bp, synthetic construct
  source 1..16: mol_type = other DNA
ctggaccttgagttgt

SEQ ID NO: 2065 - DNA, 16 bp, synthetic construct
  source 1..16: mol_type = other DNA
gctaggaccaatattc

SEQ ID NO: 2066 - DNA, 16 bp, synthetic construct
  source 1..16: mol_type = other DNA
tactgctccattaggg

SEQ ID NO: 2067 - DNA, 16 bp, synthetic construct
  source 1..16: mol_type = other DNA
atactgctccattagg

SEQ ID NO: 2068 - DNA, 16 bp, synthetic construct
  source 1..16: mol_type = other DNA
gtagtccttatttgac

SEQ ID NO: 2069 - DNA, 16 bp, synthetic construct
  source 1..16: mol_type = other DNA
gtctctgatgtagtcc

SEQ ID NO: 2070 - DNA, 16 bp, synthetic construct
  source 1..16: mol_type = other DNA
gtaccttgacatcaca

SEQ ID NO: 2071 - DNA, 16 bp, synthetic construct
  source 1..16: mol_type = other DNA
agtaccttgacatcac

SEQ ID NO: 2072 - DNA, 16 bp, synthetic construct
  source 1..16: mol_type = other DNA
cttacagtaccttgac

SEQ ID NO: 2073 - DNA, 16 bp, synthetic construct
  source 1..16: mol_type = other DNA
gccacttacagtacct

SEQ ID NO: 2074 - DNA, 16 bp, synthetic construct
  source 1..16: mol_type = other DNA
gtagctgtgtgggacc

SEQ ID NO: 2075 - DNA, 16 bp, synthetic construct
  source 1..16: mol_type = other DNA
gctattgagacatccc

SEQ ID NO: 2076 - DNA, 16 bp, synthetic construct
  source 1..16: mol_type = other DNA
agctattgagacatcc

SEQ ID NO: 2077 - DNA, 16 bp, synthetic construct
  source 1..16: mol_type = other DNA
ggctacccttcaagag

SEQ ID NO: 2078 - DNA, 16 bp, synthetic construct
  source 1..16: mol_type = other DNA
aacctgtccaataccc

SEQ ID NO: 2079 - DNA, 16 bp, synthetic construct
  source 1..16: mol_type = other DNA
tatagccagtagttgt

SEQ ID NO: 2080 - DNA, 16 bp, synthetic construct
  source 1..16: mol_type = other DNA
ccatagatagctctag

SEQ ID NO: 2081 - DNA, 16 bp, synthetic construct
  source 1..16: mol_type = other DNA
gactcatccatagccc

SEQ ID NO: 2082 - DNA, 16 bp, synthetic construct
  source 1..16: mol_type = other DNA
ctaaccactctagtag

SEQ ID NO: 2083 - DNA, 16 bp, synthetic construct
  source 1..16: mol_type = other DNA
gtgatacaataggttg

SEQ ID NO: 2084 - DNA, 16 bp, synthetic construct
  source 1..16: mol_type = other DNA
gctaaccactctagta

SEQ ID NO: 2085 - DNA, 16 bp, synthetic construct
  source 1..16: mol_type = other DNA
ggctaaccactctagt

SEQ ID NO: 2086 - DNA, 16 bp, synthetic construct
  source 1..16: mol_type = other DNA
gaggcattactaaccc

SEQ ID NO: 2087 - DNA, 16 bp, synthetic construct
  source 1..16: mol_type = other DNA
ggaggcattactaacc

SEQ ID NO: 2088 - DNA, 16 bp, synthetic construct
  source 1..16: mol_type = other DNA
cccagtctagtacagc

SEQ ID NO: 2089 - DNA, 16 bp, synthetic construct
  source 1..16: mol_type = other DNA
cacccttagtatgagt

SEQ ID NO: 2090 - DNA, 16 bp, synthetic construct
  source 1..16: mol_type = other DNA
tgaatagactcatccc

SEQ ID NO: 2091 - DNA, 16 bp, synthetic construct
  source 1..16: mol_type = other DNA
tagttaagccatgcca

SEQ ID NO: 2092 - DNA, 16 bp, synthetic construct
  source 1..16: mol_type = other DNA
gcagtcctactcagtg

SEQ ID NO: 2093 - DNA, 16 bp, synthetic construct
  source 1..16: mol_type = other DNA
agccttgtgtgtaccc

SEQ ID NO: 2094 - DNA, 16 bp, synthetic construct
  source 1..16: mol_type = other DNA
agctagggttatactc

SEQ ID NO: 2095 - DNA, 16 bp, synthetic construct
  source 1..16: mol_type = other DNA
agcccatgtactaagc

SEQ ID NO: 2096 - DNA, 16 bp, synthetic construct
  source 1..16: mol_type = other DNA
agctccattagtccta

SEQ ID NO: 2097 - DNA, 16 bp, synthetic construct
  source 1..16: mol_type = other DNA
tagcctcctttatagg

SEQ ID NO: 2098 - DNA, 16 bp, synthetic construct
  source 1..16: mol_type = other DNA
aaggtcccatagtgac

SEQ ID NO: 2099 - DNA, 16 bp, synthetic construct
  source 1..16: mol_type = other DNA
tctggtcaagagttgc

SEQ ID NO: 2100 - DNA, 16 bp, synthetic construct
  source 1..16: mol_type = other DNA
attagccctcagcagt

SEQ ID NO: 2101 - DNA, 16 bp, synthetic construct
  source 1..16: mol_type = other DNA
tattagccctcagcag

SEQ ID NO: 2102 - DNA, 16 bp, synthetic construct
  source 1..16: mol_type = other DNA
aggctacccttcaaga

SEQ ID NO: 2103 - DNA, 16 bp, synthetic construct
  source 1..16: mol_type = other DNA
gagattactcctgata

SEQ ID NO: 2104 - DNA, 16 bp, synthetic construct
  source 1..16: mol_type = other DNA
tgagactactacctgc

SEQ ID NO: 2105 - DNA, 16 bp, synthetic construct
  source 1..16: mol_type = other DNA
taaggtcccatagtga

SEQ ID NO: 2106 - DNA, 16 bp, synthetic construct
  source 1..16: mol_type = other DNA
gtattgttacctagac

SEQ ID NO: 2107 - DNA, 16 bp, synthetic construct
  source 1..16: mol_type = other DNA
agtgtagcaaccttac

SEQ ID NO: 2108 - DNA, 16 bp, synthetic construct
  source 1..16: mol_type = other DNA
aactaaggaccaatcc

SEQ ID NO: 2109 - DNA, 16 bp, synthetic construct
  source 1..16: mol_type = other DNA
cataaggtcccatagt

SEQ ID NO: 2110 - DNA, 16 bp, synthetic construct
  source 1..16: mol_type = other DNA
attaagcctcaactag

SEQ ID NO: 2111 - DNA, 16 bp, synthetic construct
  source 1..16: mol_type = other DNA
tgagcacttagtaccc

SEQ ID NO: 2112 - DNA, 16 bp, synthetic construct
  source 1..16: mol_type = other DNA
ctagttggtgtcccta

SEQ ID NO: 2113 - DNA, 16 bp, synthetic construct
  source 1..16: mol_type = other DNA
gatagtcatccagcca

SEQ ID NO: 2114 - DNA, 16 bp, synthetic construct
  source 1..16: mol_type = other DNA
ggtatctgacactcct

SEQ ID NO: 2115 - DNA, 16 bp, synthetic construct
  source 1..16: mol_type = other DNA
accctgatagcactac

SEQ ID NO: 2116 - DNA, 16 bp, synthetic construct
  source 1..16: mol_type = other DNA
gccagctaaccacaac

SEQ ID NO: 2117 - DNA, 16 bp, synthetic construct
  source 1..16: mol_type = other DNA
ccctgatagcactacc

SEQ ID NO: 2118 - DNA, 16 bp, synthetic construct
  source 1..16: mol_type = other DNA
gcttagatgatatccc

SEQ ID NO: 2119 - DNA, 16 bp, synthetic construct
  source 1..16: mol_type = other DNA
cctaatgtagccacac

SEQ ID NO: 2120 - DNA, 16 bp, synthetic construct
  source 1..16: mol_type = other DNA
ggcataccaagttgaa

SEQ ID NO: 2121 - DNA, 16 bp, synthetic construct
  source 1..16: mol_type = other DNA
gcccaatgatgatgca

SEQ ID NO: 2122 - DNA, 16 bp, synthetic construct
  source 1..16: mol_type = other DNA
ggaactactctggtca

SEQ ID NO: 2123 - DNA, 16 bp, synthetic construct
  source 1..16: mol_type = other DNA
gtacaccacttgcatg

SEQ ID NO: 2124 - DNA, 16 bp, synthetic construct
  source 1..16: mol_type = other DNA
catagaaccttggctc

SEQ ID NO: 2125 - DNA, 16 bp, synthetic construct
  source 1..16: mol_type = other DNA
ctcacatataggaccc

SEQ ID NO: 2126 - DNA, 16 bp, synthetic construct
  source 1..16: mol_type = other DNA
cctgatagcactacca

SEQ ID NO: 2127 - DNA, 16 bp, synthetic construct
  source 1..16: mol_type = other DNA
agcctgctaacaatct

SEQ ID NO: 2128 - DNA, 16 bp, synthetic construct
  source 1..16: mol_type = other DNA
ggctccaagttgttac

SEQ ID NO: 2129 - DNA, 16 bp, synthetic construct
  source 1..16: mol_type = other DNA
gtagcctcctttatag

SEQ ID NO: 2130 - DNA, 16 bp, synthetic construct
  source 1..16: mol_type = other DNA
agagacttgtggtagc

SEQ ID NO: 2131 - DNA, 16 bp, synthetic construct
  source 1..16: mol_type = other DNA
attgccagtacttgac

SEQ ID NO: 2132 - DNA, 16 bp, synthetic construct
  source 1..16: mol_type = other DNA
gccactaagagcagta

SEQ ID NO: 2133 - DNA, 16 bp, synthetic construct
  source 1..16: mol_type = other DNA
gtgtagcaaccttacc

SEQ ID NO: 2134 - DNA, 16 bp, synthetic construct
  source 1..16: mol_type = other DNA
agcttggacctattgc

SEQ ID NO: 2135 - DNA, 16 bp, synthetic construct
  source 1..16: mol_type = other DNA
gtccagaatagcatcc

SEQ ID NO: 2136 - DNA, 16 bp, synthetic construct
  source 1..16: mol_type = other DNA
tgtagccctgtggacc

SEQ ID NO: 2137 - DNA, 16 bp, synthetic construct
  source 1..16: mol_type = other DNA
atcctagagtttgacc

SEQ ID NO: 2138 - DNA, 16 bp, synthetic construct
  source 1..16: mol_type = other DNA
gacactcctctgatag

SEQ ID NO: 2139 - DNA, 16 bp, synthetic construct
  source 1..16: mol_type = other DNA
tctgaaggaccatagc

SEQ ID NO: 2140 - DNA, 16 bp, synthetic construct
  source 1..16: mol_type = other DNA
ctattatagagccaac

SEQ ID NO: 2141 - DNA, 16 bp, synthetic construct
  source 1..16: mol_type = other DNA
cactccagtaccatag

SEQ ID NO: 2142 - DNA, 16 bp, synthetic construct
  source 1..16: mol_type = other DNA
caatctggaatagggc

SEQ ID NO: 2143 - DNA, 16 bp, synthetic construct
  source 1..16: mol_type = other DNA
gtacaccagagatatc

SEQ ID NO: 2144 - DNA, 16 bp, synthetic construct
  source 1..16: mol_type = other DNA
gtacaggacccagacc

SEQ ID NO: 2145 - DNA, 16 bp, synthetic construct
  source 1..16: mol_type = other DNA
tattatagagccaacc

SEQ ID NO: 2146 - DNA, 16 bp, synthetic construct
  source 1..16: mol_type = other DNA
gtgaatagactcatcc

SEQ ID NO: 2147 - DNA, 16 bp, synthetic construct
  source 1..16: mol_type = other DNA
tccatacactggttgc

SEQ ID NO: 2148 - DNA, 16 bp, synthetic construct
  source 1..16: mol_type = other DNA
attatagagccaaccc

SEQ ID NO: 2149 - DNA, 16 bp, synthetic construct
  source 1..16: mol_type = other DNA
ctaacaagtagtgtct

SEQ ID NO: 2150 - DNA, 16 bp, synthetic construct
  source 1..16: mol_type = other DNA
gtagaccttccattgc

SEQ ID NO: 2151 - DNA, 16 bp, synthetic construct
  source 1..16: mol_type = other DNA
gtagctcatggatcac

SEQ ID NO: 2152 - DNA, 16 bp, synthetic construct
  source 1..16: mol_type = other DNA
ccataggaaatagccc

SEQ ID NO: 2153 - DNA, 16 bp, synthetic construct
  source 1..16: mol_type = other DNA
gcagactaggctcctt

SEQ ID NO: 2154 - DNA, 16 bp, synthetic construct
  source 1..16: mol_type = other DNA
gagcacttagtaccca

SEQ ID NO: 2155 - DNA, 16 bp, synthetic construct
  source 1..16: mol_type = other DNA
attgtccctacaccag

SEQ ID NO: 2156 - DNA, 16 bp, synthetic construct
  source 1..16: mol_type = other DNA
gcctgctaacaatctg

SEQ ID NO: 2157 - DNA, 16 bp, synthetic construct
  source 1..16: mol_type = other DNA
tggcaccctatttcag

SEQ ID NO: 2158 - DNA, 16 bp, synthetic construct
  source 1..16: mol_type = other DNA
gcaccaatccaccatt

SEQ ID NO: 2159 - DNA, 16 bp, synthetic construct
  source 1..16: mol_type = other DNA
gtacctttagcacact

SEQ ID NO: 2160 - DNA, 16 bp, synthetic construct
  source 1..16: mol_type = other DNA
agactagactcatcac

SEQ ID NO: 2161 - DNA, 16 bp, synthetic construct
  source 1..16: mol_type = other DNA
gcataaggtcccatag

SEQ ID NO: 2162 - DNA, 16 bp, synthetic construct
  source 1..16: mol_type = other DNA
cctggtaaagcactac

SEQ ID NO: 2163 - DNA, 16 bp, synthetic construct
  source 1..16: mol_type = other DNA
cctgacaagagatagc

SEQ ID NO: 2164 - DNA, 16 bp, synthetic construct
  source 1..16: mol_type = other DNA
gccctcctactaatgg

SEQ ID NO: 2165 - DNA, 16 bp, synthetic construct
  source 1..16: mol_type = other DNA
ctagattcttggagcc

SEQ ID NO: 2166 - DNA, 16 bp, synthetic construct
  source 1..16: mol_type = other DNA
gatcctagttaagcca

SEQ ID NO: 2167 - DNA, 16 bp, synthetic construct
  source 1..16: mol_type = other DNA
gcctaagattatccct

SEQ ID NO: 2168 - DNA, 16 bp, synthetic construct
  source 1..16: mol_type = other DNA
gagccaataatatagc

SEQ ID NO: 2169 - DNA, 16 bp, synthetic construct
  source 1..16: mol_type = other DNA
agtcctccttatgata

SEQ ID NO: 2170 - DNA, 16 bp, synthetic construct
  source 1..16: mol_type = other DNA
agtagaccttccattg

SEQ ID NO: 2171 - DNA, 16 bp, synthetic construct
  source 1..16: mol_type = other DNA
tggaactactctggtc

SEQ ID NO: 2172 - DNA, 16 bp, synthetic construct
  source 1..16: mol_type = other DNA
gctactaacagaaggt

SEQ ID NO: 2173 - DNA, 16 bp, synthetic construct
  source 1..16: mol_type = other DNA
gagcccaacttacacc

SEQ ID NO: 2174 - DNA, 16 bp, synthetic construct
  source 1..16: mol_type = other DNA
gtcctccttatgatag

SEQ ID NO: 2175 - DNA, 16 bp, synthetic construct
  source 1..16: mol_type = other DNA
agtaccatcaactgac

SEQ ID NO: 2176 - DNA, 16 bp, synthetic construct
  source 1..16: mol_type = other DNA
ggtatctacagtgcaa

SEQ ID NO: 2177 - DNA, 16 bp, synthetic construct
  source 1..16: mol_type = other DNA
actttgggtggtgtcc

SEQ ID NO: 2178 - DNA, 16 bp, synthetic construct
  source 1..16: mol_type = other DNA
gataagctcactaggt

SEQ ID NO: 2179 - DNA, 16 bp, synthetic construct
  source 1..16: mol_type = other DNA
ggcaccaactctatcc

SEQ ID NO: 2180 - DNA, 16 bp, synthetic construct
  source 1..16: mol_type = other DNA
agcacccttgtttggc

SEQ ID NO: 2181 - DNA, 16 bp, synthetic construct
  source 1..16: mol_type = other DNA
agctttaccagcccta

SEQ ID NO: 2182 - DNA, 16 bp, synthetic construct
  source 1..16: mol_type = other DNA
cctcacatataggacc

SEQ ID NO: 2183 - DNA, 16 bp, synthetic construct
  source 1..16: mol_type = other DNA
tgagctagggattacc

SEQ ID NO: 2184 - DNA, 16 bp, synthetic construct
  source 1..16: mol_type = other DNA
gcacccttgtttggca

SEQ ID NO: 2185 - DNA, 16 bp, synthetic construct
  source 1..16: mol_type = other DNA
ctgtaggcatggtata

SEQ ID NO: 2186 - DNA, 16 bp, synthetic construct
  source 1..16: mol_type = other DNA
tacaccataggctacc

SEQ ID NO: 2187 - DNA, 16 bp, synthetic construct
  source 1..16: mol_type = other DNA
gagacttgtggtagct

SEQ ID NO: 2188 - DNA, 16 bp, synthetic construct
  source 1..16: mol_type = other DNA
ggactctgatctacca

SEQ ID NO: 2189 - DNA, 16 bp, synthetic construct
  source 1..16: mol_type = other DNA
tgagcccaacttacac

SEQ ID NO: 2190 - DNA, 16 bp, synthetic construct
  source 1..16: mol_type = other DNA
cctactaatggagtta

SEQ ID NO: 2191 - DNA, 16 bp, synthetic construct
  source 1..16: mol_type = other DNA
agcataaggtcccata

SEQ ID NO: 2192 - DNA, 16 bp, synthetic construct
  source 1..16: mol_type = other DNA
gatgtacctttagcac

SEQ ID NO: 2193 - DNA, 16 bp, synthetic construct
  source 1..16: mol_type = other DNA
ttgaatggactcaacc

SEQ ID NO: 2194 - DNA, 16 bp, synthetic construct
  source 1..16: mol_type = other DNA
gccaatcccagattac

SEQ ID NO: 2195 - DNA, 16 bp, synthetic construct
  source 1..16: mol_type = other DNA
ggcaccattcaattgc

SEQ ID NO: 2196 - DNA, 16 bp, synthetic construct
  source 1..16: mol_type = other DNA
gtgtaatactatcctg

SEQ ID NO: 2197 - DNA, 16 bp, synthetic construct
  source 1..16: mol_type = other DNA
gggactctgatctacc

SEQ ID NO: 2198 - DNA, 16 bp, synthetic construct
  source 1..16: mol_type = other DNA
tgctcccagtagacta

SEQ ID NO: 2199 - DNA, 16 bp, synthetic construct
  source 1..16: mol_type = other DNA
tactagagcatcctgc

SEQ ID NO: 2200 - DNA, 16 bp, synthetic construct
  source 1..16: mol_type = other DNA
agccttgacccactta

SEQ ID NO: 2201 - DNA, 16 bp, synthetic construct
  source 1..16: mol_type = other DNA
gttgggtagcagtgac

SEQ ID NO: 2202 - DNA, 16 bp, synthetic construct
  source 1..16: mol_type = other DNA
agtataccacattggc

SEQ ID NO: 2203 - DNA, 16 bp, synthetic construct
  source 1..16: mol_type = other DNA
gcatacaacaatgggt

SEQ ID NO: 2204 - DNA, 16 bp, synthetic construct
  source 1..16: mol_type = other DNA
ccctagccaatcttag

SEQ ID NO: 2205 - DNA, 16 bp, synthetic construct
  source 1..16: mol_type = other DNA
atacccttgtagagag

SEQ ID NO: 2206 - DNA, 16 bp, synthetic construct
  source 1..16: mol_type = other DNA
tagcataaggtcccat

SEQ ID NO: 2207 - DNA, 16 bp, synthetic construct
  source 1..16: mol_type = other DNA
gactttggttgacacc

SEQ ID NO: 2208 - DNA, 16 bp, synthetic construct
  source 1..16: mol_type = other DNA
gaggtctacaatcacc

SEQ ID NO: 2209 - DNA, 16 bp, synthetic construct
  source 1..16: mol_type = other DNA
accctctggtaagtcc

SEQ ID NO: 2210 - DNA, 16 bp, synthetic construct
  source 1..16: mol_type = other DNA
ggctgaaccctaactg

SEQ ID NO: 2211 - DNA, 16 bp, synthetic construct
  source 1..16: mol_type = other DNA
ctactagagcatcctg

SEQ ID NO: 2212 - DNA, 16 bp, synthetic construct
  source 1..16: mol_type = other DNA
gtagcaaccttacctg

SEQ ID NO: 2213 - DNA, 16 bp, synthetic construct
  source 1..16: mol_type = other DNA
gccactatacagcttg

SEQ ID NO: 2214 - DNA, 16 bp, synthetic construct
  source 1..16: mol_type = other DNA
gatgggatggctctaa

SEQ ID NO: 2215 - DNA, 16 bp, synthetic construct
  source 1..16: mol_type = other DNA
gactgagactactacc

SEQ ID NO: 2216 - DNA, 16 bp, synthetic construct
  source 1..16: mol_type = other DNA
gtacatgactacctta

SEQ ID NO: 2217 - DNA, 16 bp, synthetic construct
  source 1..16: mol_type = other DNA
ctagatgtagcaggtg

SEQ ID NO: 2218 - DNA, 16 bp, synthetic construct
  source 1..16: mol_type = other DNA
ctactaacagaaggtc

SEQ ID NO: 2219 - DNA, 16 bp, synthetic construct
  source 1..16: mol_type = other DNA
actccagtaccatagt

SEQ ID NO: 2220 - DNA, 16 bp, synthetic construct
  source 1..16: mol_type = other DNA
gcccatcagatacttg

SEQ ID NO: 2221 - DNA, 16 bp, synthetic construct
  source 1..16: mol_type = other DNA
gtgctaactataccag

SEQ ID NO: 2222 - DNA, 16 bp, synthetic construct
  source 1..16: mol_type = other DNA
gtgctcaccaataagg

SEQ ID NO: 2223 - DNA, 16 bp, synthetic construct
  source 1..16: mol_type = other DNA
catagcataaggtccc

SEQ ID NO: 2224 - DNA, 16 bp, synthetic construct
  source 1..16: mol_type = other DNA
tattagtgcagccctt

SEQ ID NO: 2225 - DNA, 16 bp, synthetic construct
  source 1..16: mol_type = other DNA
catagatagctctagg

SEQ ID NO: 2226 - DNA, 16 bp, synthetic construct
  source 1..16: mol_type = other DNA
cctagcttaccagagg

SEQ ID NO: 2227 - DNA, 16 bp, synthetic construct
  source 1..16: mol_type = other DNA
tacccttgtagagagc

SEQ ID NO: 2228 - DNA, 16 bp, synthetic construct
  source 1..16: mol_type = other DNA
accttagctgtccaac

SEQ ID NO: 2229 - DNA, 16 bp, synthetic construct
  source 1..16: mol_type = other DNA
gatacactagctcagc

SEQ ID NO: 2230 - DNA, 16 bp, synthetic construct
  source 1..16: mol_type = other DNA
ccatagcataaggtcc

SEQ ID NO: 2231 - DNA, 16 bp, synthetic construct
  source 1..16: mol_type = other DNA
ggcttgtatcacccaa

SEQ ID NO: 2232 - DNA, 16 bp, synthetic construct
  source 1..16: mol_type = other DNA
tgctcaccaataaggc

SEQ ID NO: 2233 - DNA, 16 bp, synthetic construct
  source 1..16: mol_type = other DNA
tagcaaccttacctgc

SEQ ID NO: 2234 - DNA, 16 bp, synthetic construct
  source 1..16: mol_type = other DNA
actaggcaatggcacc

SEQ ID NO: 2235 - DNA, 16 bp, synthetic construct
  source 1..16: mol_type = other DNA
accctaacattggagt

SEQ ID NO: 2236 - DNA, 16 bp, synthetic construct
  source 1..16: mol_type = other DNA
gttgccaatagagtat

SEQ ID NO: 2237 - DNA, 16 bp, synthetic construct
  source 1..16: mol_type = other DNA
ccactatacagcttga

SEQ ID NO: 2238 - DNA, 16 bp, synthetic construct
  source 1..16: mol_type = other DNA
ggataccacttgatca

SEQ ID NO: 2239 - DNA, 16 bp, synthetic construct
  source 1..16: mol_type = other DNA
tacacacctagtactc

SEQ ID NO: 2240 - DNA, 16 bp, synthetic construct
  source 1..16: mol_type = other DNA
gcaacattcatagccc

SEQ ID NO: 2241 - DNA, 16 bp, synthetic construct
  source 1..16: mol_type = other DNA
tagccaccagctttag

SEQ ID NO: 2242 - DNA, 16 bp, synthetic construct
  source 1..16: mol_type = other DNA
gacagcctactaccaa

SEQ ID NO: 2243 - DNA, 16 bp, synthetic construct
  source 1..16: mol_type = other DNA
gcctcaacaatgccta

SEQ ID NO: 2244 - DNA, 16 bp, synthetic construct
  source 1..16: mol_type = other DNA
gctgattaccctacat

SEQ ID NO: 2245 - DNA, 16 bp, synthetic construct
  source 1..16: mol_type = other DNA
gcagccttgatagtgc

SEQ ID NO: 2246 - DNA, 16 bp, synthetic construct
  source 1..16: mol_type = other DNA
tgttgcacctcttagg

SEQ ID NO: 2247 - DNA, 16 bp, synthetic construct
  source 1..16: mol_type = other DNA
acacctagtactctac

SEQ ID NO: 2248 - DNA, 16 bp, synthetic construct
  source 1..16: mol_type = other DNA
gatattgcctatctgc

SEQ ID NO: 2249 - DNA, 16 bp, synthetic construct
  source 1..16: mol_type = other DNA
gtatatgttctggcac

SEQ ID NO: 2250 - DNA, 16 bp, synthetic construct
  source 1..16: mol_type = other DNA
gctagaagtgcctaac

SEQ ID NO: 2251 - DNA, 16 bp, synthetic construct
  source 1..16: mol_type = other DNA
atgttgcacctcttag

SEQ ID NO: 2252 - DNA, 16 bp, synthetic construct
  source 1..16: mol_type = other DNA
gtataactcttagtcc

SEQ ID NO: 2253 - DNA, 16 bp, synthetic construct
  source 1..16: mol_type = other DNA
agcaccctgatagcac

SEQ ID NO: 2254 - DNA, 16 bp, synthetic construct
  source 1..16: mol_type = other DNA
cttgagagtagtccct

SEQ ID NO: 2255 - DNA, 16 bp, synthetic construct
  source 1..16: mol_type = other DNA
caggttccaactaagt

SEQ ID NO: 2256 - DNA, 16 bp, synthetic construct
  source 1..16: mol_type = other DNA
gttaatccagcactag

SEQ ID NO: 2257 - DNA, 16 bp, synthetic construct
  source 1..16: mol_type = other DNA
tagattggcttgatgc

SEQ ID NO: 2258 - DNA, 16 bp, synthetic construct
  source 1..16: mol_type = other DNA
agcaagtagccaattg

SEQ ID NO: 2259 - DNA, 16 bp, synthetic construct
  source 1..16: mol_type = other DNA
gctactaacaccatgc

SEQ ID NO: 2260 - DNA, 16 bp, synthetic construct
  source 1..16: mol_type = other DNA
gactcatcacctggac

SEQ ID NO: 2261 - DNA, 16 bp, synthetic construct
  source 1..16: mol_type = other DNA
acctcacatataggac

SEQ ID NO: 2262 - DNA, 16 bp, synthetic construct
  source 1..16: mol_type = other DNA
tctgggacagttagcc

SEQ ID NO: 2263 - DNA, 16 bp, synthetic construct
  source 1..16: mol_type = other DNA
gactaccttagctgtc

SEQ ID NO: 2264 - DNA, 16 bp, synthetic construct
  source 1..16: mol_type = other DNA
ggtttacacccatgac

SEQ ID NO: 2265 - DNA, 16 bp, synthetic construct
  source 1..16: mol_type = other DNA
ctaggcaacttaaagc

SEQ ID NO: 2266 - DNA, 16 bp, synthetic construct
  source 1..16: mol_type = other DNA
ctaagattatccctag

SEQ ID NO: 2267 - DNA, 16 bp, synthetic construct
  source 1..16: mol_type = other DNA
ctcctagcttaccaga

SEQ ID NO: 2268 - DNA, 16 bp, synthetic construct
  source 1..16: mol_type = other DNA
tagcctaataagactc

SEQ ID NO: 2269 - DNA, 16 bp, synthetic construct
  source 1..16: mol_type = other DNA
gtgactatagaccttc

SEQ ID NO: 2270 - DNA, 16 bp, synthetic construct
  source 1..16: mol_type = other DNA
tacaccacttgcatga

SEQ ID NO: 2271 - DNA, 16 bp, synthetic construct
  source 1..16: mol_type = other DNA
tatcaagagccagtac

SEQ ID NO: 2272 - DNA, 16 bp, synthetic construct
  source 1..16: mol_type = other DNA
aagtgtcctacatagc

SEQ ID NO: 2273 - DNA, 16 bp, synthetic construct
  source 1..16: mol_type = other DNA
gaagagtacatatccc

SEQ ID NO: 2274 - DNA, 16 bp, synthetic construct
  source 1..16: mol_type = other DNA
actagattcttggagc

SEQ ID NO: 2275 - DNA, 16 bp, synthetic construct
  source 1..16: mol_type = other DNA
gtcctagtttgaccac

SEQ ID NO: 2276 - DNA, 16 bp, synthetic construct
  source 1..16: mol_type = other DNA
ttgaccaacaatagcc

SEQ ID NO: 2277 - DNA, 16 bp, synthetic construct
  source 1..16: mol_type = other DNA
ctgtaagggtggcaac

SEQ ID NO: 2278 - DNA, 16 bp, synthetic construct
  source 1..16: mol_type = other DNA
gtcactaccctaagag

SEQ ID NO: 2279 - DNA, 16 bp, synthetic construct
  source 1..16: mol_type = other DNA
taggtatccctctcaa

SEQ ID NO: 2280 - DNA, 16 bp, synthetic construct
  source 1..16: mol_type = other DNA
ggactctacagcaggt

SEQ ID NO: 2281 - DNA, 16 bp, synthetic construct
  source 1..16: mol_type = other DNA
caatcatggaatgtcc

SEQ ID NO: 2282 - DNA, 16 bp, synthetic construct
  source 1..16: mol_type = other DNA
cttgtacctagagcct

SEQ ID NO: 2283 - DNA, 16 bp, synthetic construct
  source 1..16: mol_type = other DNA
gatagtcaattcagtc

SEQ ID NO: 2284 - DNA, 16 bp, synthetic construct
  source 1..16: mol_type = other DNA
ctcctaatgacctagc

SEQ ID NO: 2285 - DNA, 16 bp, synthetic construct
  source 1..16: mol_type = other DNA
tgttagcccatctagg

SEQ ID NO: 2286 - DNA, 16 bp, synthetic construct
  source 1..16: mol_type = other DNA
gaccatgaccagacta

SEQ ID NO: 2287 - DNA, 16 bp, synthetic construct
  source 1..16: mol_type = other DNA
gcttaatcagccttac

SEQ ID NO: 2288 - DNA, 16 bp, synthetic construct
  source 1..16: mol_type = other DNA
atagctgattacccta

SEQ ID NO: 2289 - DNA, 16 bp, synthetic construct
  source 1..16: mol_type = other DNA
gctccagtaagtgtac

SEQ ID NO: 2290 - DNA, 16 bp, synthetic construct
  source 1..16: mol_type = other DNA
accaatccttagacca

SEQ ID NO: 2291 - DNA, 16 bp, synthetic construct
  source 1..16: mol_type = other DNA
ggctctatctaacctg

SEQ ID NO: 2292 - DNA, 16 bp, synthetic construct
  source 1..16: mol_type = other DNA
agtgactatagacctt

SEQ ID NO: 2293 - DNA, 16 bp, synthetic construct
  source 1..16: mol_type = other DNA
gactatagaccttcta

SEQ ID NO: 2294 - DNA, 16 bp, synthetic construct
  source 1..16: mol_type = other DNA
gttggtgctttgtcac

SEQ ID NO: 2295 - DNA, 16 bp, synthetic construct
  source 1..16: mol_type = other DNA
gcatctaacctcttag

SEQ ID NO: 2296 - DNA, 16 bp, synthetic construct
  source 1..16: mol_type = other DNA
gactcactaagtacct

SEQ ID NO: 2297 - DNA, 16 bp, synthetic construct
  source 1..16: mol_type = other DNA
gcaccagtagtcacct

SEQ ID NO: 2298 - DNA, 16 bp, synthetic construct
  source 1..16: mol_type = other DNA
atccagtcaacctagc

SEQ ID NO: 2299 - DNA, 16 bp, synthetic construct
  source 1..16: mol_type = other DNA
cattagtctgcccaac

SEQ ID NO: 2300 - DNA, 16 bp, synthetic construct
  source 1..16: mol_type = other DNA
ccaatccttagaccac

SEQ ID NO: 2301 - DNA, 16 bp, synthetic construct
  source 1..16: mol_type = other DNA
gatgacttagacatgc

SEQ ID NO: 2302 - DNA, 16 bp, synthetic construct
  source 1..16: mol_type = other DNA
ccatacactggttgca

SEQ ID NO: 2303 - DNA, 16 bp, synthetic construct
  source 1..16: mol_type = other DNA
cctccttatgatagag

SEQ ID NO: 2304 - DNA, 16 bp, synthetic construct
  source 1..16: mol_type = other DNA
gtggttctttaggctc

SEQ ID NO: 2305 - DNA, 16 bp, synthetic construct
  source 1..16: mol_type = other DNA
ctaagggaggttcact

SEQ ID NO: 2306 - DNA, 16 bp, synthetic construct
  source 1..16: mol_type = other DNA
cccagttgtatgtagg

SEQ ID NO: 2307 - DNA, 16 bp, synthetic construct
  source 1..16: mol_type = other DNA
gcaccctgatagcact

SEQ ID NO: 2308 - DNA, 16 bp, synthetic construct
  source 1..16: mol_type = other DNA
aggttccaactaagtc

SEQ ID NO: 2309 - DNA, 16 bp, synthetic construct
  source 1..16: mol_type = other DNA
gagtcaccaaccatga

SEQ ID NO: 2310 - DNA, 16 bp, synthetic construct
  source 1..16: mol_type = other DNA
ataggtatccctctca

SEQ ID NO: 2311 - DNA, 16 bp, synthetic construct
  source 1..16: mol_type = other DNA
gtgtactcagaccttg

SEQ ID NO: 2312 - DNA, 16 bp, synthetic construct
  source 1..16: mol_type = other DNA
cttatccagtgcaacc

SEQ ID NO: 2313 - DNA, 16 bp, synthetic construct
  source 1..16: mol_type = other DNA
ctacactacagagccc

SEQ ID NO: 2314 - DNA, 16 bp, synthetic construct
  source 1..16: mol_type = other DNA
gggcatcctctaggtt

SEQ ID NO: 2315 - DNA, 16 bp, synthetic construct
  source 1..16: mol_type = other DNA
gcacataagaccctgc

SEQ ID NO: 2316 - DNA, 16 bp, synthetic construct
  source 1..16: mol_type = other DNA
ggtccctaacaatgcc

SEQ ID NO: 2317 - DNA, 16 bp, synthetic construct
  source 1..16: mol_type = other DNA
gcctggaagttaagcc

SEQ ID NO: 2318 - DNA, 16 bp, synthetic construct
  source 1..16: mol_type = other DNA
gactatatcaaccacc

SEQ ID NO: 2319 - DNA, 16 bp, synthetic construct
  source 1..16: mol_type = other DNA
ggtcccaactctaacc

SEQ ID NO: 2320 - DNA, 16 bp, synthetic construct
  source 1..16: mol_type = other DNA
ggatcaaccaaaccct

SEQ ID NO: 2321 - DNA, 16 bp, synthetic construct
  source 1..16: mol_type = other DNA
gacactagactgcatc

SEQ ID NO: 2322 - DNA, 16 bp, synthetic construct
  source 1..16: mol_type = other DNA
cataatgacctgaccc

SEQ ID NO: 2323 - DNA, 16 bp, synthetic construct
  source 1..16: mol_type = other DNA
gaccacttactaatgg

SEQ ID NO: 2324 - DNA, 16 bp, synthetic construct
  source 1..16: mol_type = other DNA
gtccatgagtaccagc

SEQ ID NO: 2325 - DNA, 16 bp, synthetic construct
  source 1..16: mol_type = other DNA
gcattctatacagccc

SEQ ID NO: 2326 - DNA, 16 bp, synthetic construct
  source 1..16: mol_type = other DNA
gcacataagaccctgc

SEQ ID NO: 2327 - DNA, 16 bp, synthetic construct
  source 1..16: mol_type = other DNA
gatgccagtctaacct

SEQ ID NO: 2328 - DNA, 16 bp, synthetic construct
  source 1..16: mol_type = other DNA
ctagcctcacactaac

SEQ ID NO: 2329 - DNA, 16 bp, synthetic construct
  source 1..16: mol_type = other DNA
gagtttagggcatacc

SEQ ID NO: 2330 - DNA, 16 bp, synthetic construct
  source 1..16: mol_type = other DNA
gtctagcctcacacta

SEQ ID NO: 2331 - DNA, 16 bp, synthetic construct
  source 1..16: mol_type = other DNA
gagtatcactaccctc

SEQ ID NO: 2332 - DNA, 16 bp, synthetic construct
  source 1..16: mol_type = other DNA
tgcccttggttatagg

SEQ ID NO: 2333 - DNA, 16 bp, synthetic construct
  source 1..16: mol_type = other DNA
cagcccattagtcatg

SEQ ID NO: 2334 - DNA, 16 bp, synthetic construct
  source 1..16: mol_type = other DNA
gataccaagtagcatc

SEQ ID NO: 2335 - DNA, 16 bp, synthetic construct
  source 1..16: mol_type = other DNA
tgtaacccatacaacc

SEQ ID NO: 2336 - DNA, 16 bp, synthetic construct
  source 1..16: mol_type = other DNA
gggcaaacatctagtg

SEQ ID NO: 2337 - DNA, 16 bp, synthetic construct
  source 1..16: mol_type = other DNA
ggatcacccaaccagg

SEQ ID NO: 2338 - DNA, 16 bp, synthetic construct
  source 1..16: mol_type = other DNA
gttgttgacccattac

SEQ ID NO: 2339 - DNA, 16 bp, synthetic construct
  source 1..16: mol_type = other DNA
tgttgacccattactg

SEQ ID NO: 2340 - DNA, 16 bp, synthetic construct
  source 1..16: mol_type = other DNA
ccagcatgatagggtc

SEQ ID NO: 2341 - DNA, 16 bp, synthetic construct
  source 1..16: mol_type = other DNA
gtaacccatacaaccc

SEQ ID NO: 2342 - DNA, 16 bp, synthetic construct
  source 1..16: mol_type = other DNA
gttgacccattactgg

SEQ ID NO: 2343 - DNA, 16 bp, synthetic construct
  source 1..16: mol_type = other DNA
gtctagcctcatactg

SEQ ID NO: 2344 - DNA, 16 bp, synthetic construct
  source 1..16: mol_type = other DNA
gtaagtcccatgaccc

SEQ ID NO: 2345 - DNA, 16 bp, synthetic construct
  source 1..16: mol_type = other DNA
cccatagaggatgccc

SEQ ID NO: 2346 - DNA, 16 bp, synthetic construct
  source 1..16: mol_type = other DNA
ttgtacctactaagcc

SEQ ID NO: 2347 - DNA, 16 bp, synthetic construct
  source 1..16: mol_type = other DNA
ccatcaagctcctagc

SEQ ID NO: 2348 - DNA, 16 bp, synthetic construct
  source 1..16: mol_type = other DNA
gagtttatcacaaccc

SEQ ID NO: 2349 - DNA, 16 bp, synthetic construct
  source 1..16: mol_type = other DNA
ctctcataggatgccc

SEQ ID NO: 2350 - DNA, 16 bp, synthetic construct
  source 1..16: mol_type = other DNA
gcacataagaccctgc

SEQ ID NO: 2351 - DNA, 16 bp, synthetic construct
  source 1..16: mol_type = other DNA
ctacctgcattgagac

SEQ ID NO: 2352 - DNA, 16 bp, synthetic construct
  source 1..16: mol_type = other DNA
ggcatagttaccacac

SEQ ID NO: 2353 - DNA, 16 bp, synthetic construct
  source 1..16: mol_type = other DNA
gccatgtcctagactg

SEQ ID NO: 2354 - DNA, 16 bp, synthetic construct
  source 1..16: mol_type = other DNA
gccctagcaagccttg

SEQ ID NO: 2355 - DNA, 16 bp, synthetic construct
  source 1..16: mol_type = other DNA
ggctgacctccataga

SEQ ID NO: 2356 - DNA, 16 bp, synthetic construct
  source 1..16: mol_type = other DNA
gctgacctccatagat

SEQ ID NO: 2357 - DNA, 16 bp, synthetic construct
  source 1..16: mol_type = other DNA
gtgctacccaaccttg

SEQ ID NO: 2358 - DNA, 16 bp, synthetic construct
  source 1..16: mol_type = other DNA
gcattacaacctccta

SEQ ID NO: 2359 - DNA, 16 bp, synthetic construct
  source 1..16: mol_type = other DNA
gttgtacctactaagc

SEQ ID NO: 2360 - DNA, 16 bp, synthetic construct
  source 1..16: mol_type = other DNA
atgagtatcactaccc

SEQ ID NO: 2361 - DNA, 16 bp, synthetic construct
  source 1..16: mol_type = other DNA
cagcatgatagggtcc

SEQ ID NO: 2362 - DNA, 16 bp, synthetic construct
  source 1..16: mol_type = other DNA
taggactgaccattca

SEQ ID NO: 2363 - DNA, 16 bp, synthetic construct
  source 1..16: mol_type = other DNA
gcatggtccctaacaa

SEQ ID NO: 2364 - DNA, 16 bp, synthetic construct
  source 1..16: mol_type = other DNA
gcatagttaccacacc

SEQ ID NO: 2365 - DNA, 16 bp, synthetic construct
  source 1..16: mol_type = other DNA
ttaggcaacccagcac

SEQ ID NO: 2366 - DNA, 16 bp, synthetic construct
  source 1..16: mol_type = other DNA
gcaagtccatacactc

SEQ ID NO: 2367 - DNA, 16 bp, synthetic construct
  source 1..16: mol_type = other DNA
agcctgtccattgatc

SEQ ID NO: 2368 - DNA, 16 bp, synthetic construct
  source 1..16: mol_type = other DNA
taggctgacctccata

SEQ ID NO: 2369 - DNA, 16 bp, synthetic construct
  source 1..16: mol_type = other DNA
agagtggacctaatcc

SEQ ID NO: 2370 - DNA, 16 bp, synthetic construct
  source 1..16: mol_type = other DNA
gtacctactaagccaa

SEQ ID NO: 2371 - DNA, 16 bp, synthetic construct
  source 1..16: mol_type = other DNA
gacatcatattagccc

SEQ ID NO: 2372 - DNA, 16 bp, synthetic construct
  source 1..16: mol_type = other DNA
ctggttaggtctatag

SEQ ID NO: 2373 - DNA, 16 bp, synthetic construct
  source 1..16: mol_type = other DNA
cctctcataggatgcc

SEQ ID NO: 2374 - DNA, 16 bp, synthetic construct
  source 1..16: mol_type = other DNA
gtgccaagctatcata

SEQ ID NO: 2375 - DNA, 16 bp, synthetic construct
  source 1..16: mol_type = other DNA
tacctactaagccaag

SEQ ID NO: 2376 - DNA, 16 bp, synthetic construct
  source 1..16: mol_type = other DNA
ttgggtgattagggcc

SEQ ID NO: 2377 - DNA, 16 bp, synthetic construct
  source 1..16: mol_type = other DNA
gatacagactgctaac

SEQ ID NO: 2378 - DNA, 16 bp, synthetic construct
  source 1..16: mol_type = other DNA
gtaatgcctatcaagc

SEQ ID NO: 2379 - DNA, 16 bp, synthetic construct
  source 1..16: mol_type = other DNA
tgtattggcacccaga

SEQ ID NO: 2380 - DNA, 16 bp, synthetic construct
  source 1..16: mol_type = other DNA
gcaagttaccctccac

SEQ ID NO: 2381 - DNA, 16 bp, synthetic construct
  source 1..16: mol_type = other DNA
gcctgagcacttctag

SEQ ID NO: 2382 - DNA, 16 bp, synthetic construct
  source 1..16: mol_type = other DNA
gcactaaggactgttc

SEQ ID NO: 2383 - DNA, 16 bp, synthetic construct
  source 1..16: mol_type = other DNA
acctactaagccaagc

SEQ ID NO: 2384 - DNA, 16 bp, synthetic construct
  source 1..16: mol_type = other DNA
gaaggttactccagtt

SEQ ID NO: 2385 - DNA, 16 bp, synthetic construct
  source 1..16: mol_type = other DNA
gctctaagaccttgtc

SEQ ID NO: 2386 - DNA, 16 bp, synthetic construct
  source 1..16: mol_type = other DNA
gacctcaacttgtgca

SEQ ID NO: 2387 - DNA, 16 bp, synthetic construct
  source 1..16: mol_type = other DNA
aggctaccagaccctt

SEQ ID NO: 2388 - DNA, 16 bp, synthetic construct
  source 1..16: mol_type = other DNA
aatacaccagcttgcc

SEQ ID NO: 2389 - DNA, 16 bp, synthetic construct
  source 1..16: mol_type = other DNA
gccaagctatcataac

SEQ ID NO: 2390 - DNA, 16 bp, synthetic construct
  source 1..16: mol_type = other DNA
agtactcccaacaggc

SEQ ID NO: 2391 - DNA, 16 bp, synthetic construct
  source 1..16: mol_type = other DNA
ggacctcaacttgtgc

SEQ ID NO: 2392 - DNA, 16 bp, synthetic construct
  source 1..16: mol_type = other DNA
gagagtggacctaatc

SEQ ID NO: 2393 - DNA, 16 bp, synthetic construct
  source 1..16: mol_type = other DNA
acccttagacaacctc

SEQ ID NO: 2394 - DNA, 16 bp, synthetic construct
  source 1..16: mol_type = other DNA
agttgccacttgagac

SEQ ID NO: 2395 - DNA, 16 bp, synthetic construct
  source 1..16: mol_type = other DNA
ctaggactgaccattc

SEQ ID NO: 2396 - DNA, 16 bp, synthetic construct
  source 1..16: mol_type = other DNA
cagttgagggcagtac

SEQ ID NO: 2397 - DNA, 16 bp, synthetic construct
  source 1..16: mol_type = other DNA
ctatcaaaccataggc

SEQ ID NO: 2398 - DNA, 16 bp, synthetic construct
  source 1..16: mol_type = other DNA
gtttgattgcaaccct

SEQ ID NO: 2399 - DNA, 16 bp, synthetic construct
  source 1..16: mol_type = other DNA
gctaaccaatctttgc

SEQ ID NO: 2400 - DNA, 16 bp, synthetic construct
  source 1..16: mol_type = other DNA
ggatcaacctgctgcc

SEQ ID NO: 2401 - DNA, 16 bp, synthetic construct
  source 1..16: mol_type = other DNA
gcaagactgtagagcc

SEQ ID NO: 2402 - DNA, 16 bp, synthetic construct
  source 1..16: mol_type = other DNA
gagcaacttcaggtac

SEQ ID NO: 2403 - DNA, 16 bp, synthetic construct
  source 1..16: mol_type = other DNA
acttgtatggcaccta

SEQ ID NO: 2404 - DNA, 16 bp, synthetic construct
  source 1..16: mol_type = other DNA
ccaagtaatggtgtgc

SEQ ID NO: 2405 - DNA, 16 bp, synthetic construct
  source 1..16: mol_type = other DNA
atgcctgactaagtgg

SEQ ID NO: 2406 - DNA, 16 bp, synthetic construct
  source 1..16: mol_type = other DNA
gcataatgacctgacc

SEQ ID NO: 2407 - DNA, 16 bp, synthetic construct
  source 1..16: mol_type = other DNA
gcaggtatgactactc

SEQ ID NO: 2408 - DNA, 16 bp, synthetic construct
  source 1..16: mol_type = other DNA
aggttgtcaagggtcc

SEQ ID NO: 2409 - DNA, 16 bp, synthetic construct
  source 1..16: mol_type = other DNA
atgcccttggttatag

SEQ ID NO: 2410 - DNA, 16 bp, synthetic construct
  source 1..16: mol_type = other DNA
tgctagactcaggtgt

SEQ ID NO: 2411 - DNA, 16 bp, synthetic construct
  source 1..16: mol_type = other DNA
ttgtcctagccaagac

SEQ ID NO: 2412 - DNA, 16 bp, synthetic construct
  source 1..16: mol_type = other DNA
gttgccacttgagact

SEQ ID NO: 2413 - DNA, 16 bp, synthetic construct
  source 1..16: mol_type = other DNA
tctagggtaggctgac

SEQ ID NO: 2414 - DNA, 16 bp, synthetic construct
  source 1..16: mol_type = other DNA
gcaccataagaatctc

SEQ ID NO: 2415 - DNA, 16 bp, synthetic construct
  source 1..16: mol_type = other DNA
actggtgttagagagc

SEQ ID NO: 2416 - DNA, 16 bp, synthetic construct
  source 1..16: mol_type = other DNA
atgccagtctaacctg

SEQ ID NO: 2417 - DNA, 16 bp, synthetic construct
  source 1..16: mol_type = other DNA
ctagtcaagaaccaac

SEQ ID NO: 2418 - DNA, 16 bp, synthetic construct
  source 1..16: mol_type = other DNA
gagcatattactcctc

SEQ ID NO: 2419 - DNA, 16 bp, synthetic construct
  source 1..16: mol_type = other DNA
gtccagagcatattac

SEQ ID NO: 2420 - DNA, 16 bp, synthetic construct
  source 1..16: mol_type = other DNA
gacccacaatgctgac

SEQ ID NO: 2421 - DNA, 16 bp, synthetic construct
  source 1..16: mol_type = other DNA
ggactatatcaaccac

SEQ ID NO: 2422 - DNA, 16 bp, synthetic construct
  source 1..16: mol_type = other DNA
gcatactcagattatc

SEQ ID NO: 2423 - DNA, 16 bp, synthetic construct
  source 1..16: mol_type = other DNA
cactagtccagtcaag

SEQ ID NO: 2424 - DNA, 16 bp, synthetic construct
  source 1..16: mol_type = other DNA
gccctatccacaaggt

SEQ ID NO: 2425 - DNA, 16 bp, synthetic construct
  source 1..16: mol_type = other DNA
gaatacaccagcttgc

SEQ ID NO: 2426 - DNA, 16 bp, synthetic construct
  source 1..16: mol_type = other DNA
gagtcattgtttgccc

SEQ ID NO: 2427 - DNA, 16 bp, synthetic construct
  source 1..16: mol_type = other DNA
gcattgagacacccac

SEQ ID NO: 2428 - DNA, 16 bp, synthetic construct
  source 1..16: mol_type = other DNA
cctactaagccaagct

SEQ ID NO: 2429 - DNA, 16 bp, synthetic construct
  source 1..16: mol_type = other DNA
ggtctggtcaatgtcc

SEQ ID NO: 2430 - DNA, 16 bp, synthetic construct
  source 1..16: mol_type = other DNA
tgtttgattgcaaccc

SEQ ID NO: 2431 - DNA, 16 bp, synthetic construct
  source 1..16: mol_type = other DNA
gaccactcatcagccc

SEQ ID NO: 2432 - DNA, 16 bp, synthetic construct
  source 1..16: mol_type = other DNA
gtagtgtggagtcatg

SEQ ID NO: 2433 - DNA, 16 bp, synthetic construct
  source 1..16: mol_type = other DNA
tggactctatgcaccc

SEQ ID NO: 2434 - DNA, 16 bp, synthetic construct
  source 1..16: mol_type = other DNA
ggatgcttgactctcc

SEQ ID NO: 2435 - DNA, 16 bp, synthetic construct
  source 1..16: mol_type = other DNA
taatctactaagcctc

SEQ ID NO: 2436 - DNA, 16 bp, synthetic construct
  source 1..16: mol_type = other DNA
gtaccatcagaagccc

SEQ ID NO: 2437 - DNA, 16 bp, synthetic construct
  source 1..16: mol_type = other DNA
ggcataccctcattat

SEQ ID NO: 2438 - DNA, 16 bp, synthetic construct
  source 1..16: mol_type = other DNA
ggtaatcctcattgac

SEQ ID NO: 2439 - DNA, 16 bp, synthetic construct
  source 1..16: mol_type = other DNA
gtagcatccaggcatc

SEQ ID NO: 2440 - DNA, 16 bp, synthetic construct
  source 1..16: mol_type = other DNA
ggacctatctttcagc

SEQ ID NO: 2441 - DNA, 16 bp, synthetic construct
  source 1..16: mol_type = other DNA
gacatctgctagaggc

SEQ ID NO: 2442 - DNA, 16 bp, synthetic construct
  source 1..16: mol_type = other DNA
tcatggtcctaagtgg

SEQ ID NO: 2443 - DNA, 16 bp, synthetic construct
  source 1..16: mol_type = other DNA
gctgccctagatccaa

SEQ ID NO: 2444 - DNA, 16 bp, synthetic construct
  source 1..16: mol_type = other DNA
ggtcctactccatgta

SEQ ID NO: 2445 - DNA, 16 bp, synthetic construct
  source 1..16: mol_type = other DNA
gatgcctgactaagtg

SEQ ID NO: 2446 - DNA, 16 bp, synthetic construct
  source 1..16: mol_type = other DNA
tagtcaagaaccaacc

SEQ ID NO: 2447 - DNA, 16 bp, synthetic construct
  source 1..16: mol_type = other DNA
taagcctttgaccagc

SEQ ID NO: 2448 - DNA, 16 bp, synthetic construct
  source 1..16: mol_type = other DNA
ctaacaagggtctagc

SEQ ID NO: 2449 - DNA, 16 bp, synthetic construct
  source 1..16: mol_type = other DNA
tagcctcatactgacc

SEQ ID NO: 2450 - DNA, 16 bp, synthetic construct
  source 1..16: mol_type = other DNA
gcctgtaagcatatac

SEQ ID NO: 2451 - DNA, 16 bp, synthetic construct
  source 1..16: mol_type = other DNA
ggatgtacttaggcac

SEQ ID NO: 2452 - DNA, 16 bp, synthetic construct
  source 1..16: mol_type = other DNA
gctgagacttaccctc

SEQ ID NO: 2453 - DNA, 16 bp, synthetic construct
  source 1..16: mol_type = other DNA
gcccatatctacctgg

SEQ ID NO: 2454 - DNA, 16 bp, synthetic construct
  source 1..16: mol_type = other DNA
agttgagggcagtacc

SEQ ID NO: 2455 - DNA, 16 bp, synthetic construct
  source 1..16: mol_type = other DNA
caatgggtgtaggttc

SEQ ID NO: 2456 - DNA, 16 bp, synthetic construct
  source 1..16: mol_type = other DNA
gttacccttagcccag

SEQ ID NO: 2457 - DNA, 16 bp, synthetic construct
  source 1..16: mol_type = other DNA
gcccatatctacctgg

SEQ ID NO: 2458 - DNA, 16 bp, synthetic construct
  source 1..16: mol_type = other DNA
gtgactttggtgggcc

SEQ ID NO: 2459 - DNA, 16 bp, synthetic construct
  source 1..16: mol_type = other DNA
ctacttacactgaggg

SEQ ID NO: 2460 - DNA, 16 bp, synthetic construct
  source 1..16: mol_type = other DNA
gttcatgtaccacagg

SEQ ID NO: 2461 - DNA, 16 bp, synthetic construct
  source 1..16: mol_type = other DNA
tgctactaaccagccc

SEQ ID NO: 2462 - DNA, 16 bp, synthetic construct
  source 1..16: mol_type = other DNA
cttgtatggcacctat

SEQ ID NO: 2463 - DNA, 16 bp, synthetic construct
  source 1..16: mol_type = other DNA
gtaaccagtaccagga

SEQ ID NO: 2464 - DNA, 16 bp, synthetic construct
  source 1..16: mol_type = other DNA
gccactagataaggtc

SEQ ID NO: 2465 - DNA, 16 bp, synthetic construct
  source 1..16: mol_type = other DNA
gacagtgagccagtac

SEQ ID NO: 2466 - DNA, 16 bp, synthetic construct
  source 1..16: mol_type = other DNA
tttacataggagggcc

SEQ ID NO: 2467 - DNA, 16 bp, synthetic construct
  source 1..16: mol_type = other DNA
tgttgtacctactaag

SEQ ID NO: 2468 - DNA, 16 bp, synthetic construct
  source 1..16: mol_type = other DNA
actagtccagtcaagg

SEQ ID NO: 2469 - DNA, 16 bp, synthetic construct
  source 1..16: mol_type = other DNA
attgtcagctaggagc

SEQ ID NO: 2470 - DNA, 16 bp, synthetic construct
  source 1..16: mol_type = other DNA
gagcaatctcccttac

SEQ ID NO: 2471 - DNA, 16 bp, synthetic construct
  source 1..16: mol_type = other DNA
gctagtcaagaaccaa

SEQ ID NO: 2472 - DNA, 16 bp, synthetic construct
  source 1..16: mol_type = other DNA
gaccaagtccatgagc

SEQ ID NO: 2473 - DNA, 16 bp, synthetic construct
  source 1..16: mol_type = other DNA
actaacaagggtctag

SEQ ID NO: 2474 - DNA, 16 bp, synthetic construct
  source 1..16: mol_type = other DNA
tagtgtggagtcatgg

SEQ ID NO: 2475 - DNA, 16 bp, synthetic construct
  source 1..16: mol_type = other DNA
ggacttgccaatatga

SEQ ID NO: 2476 - DNA, 16 bp, synthetic construct
  source 1..16: mol_type = other DNA
ttgtgtaagggcttgg

SEQ ID NO: 2477 - DNA, 16 bp, synthetic construct
  source 1..16: mol_type = other DNA
tgccactagataaggt

SEQ ID NO: 2478 - DNA, 16 bp, synthetic construct
  source 1..16: mol_type = other DNA
gatgtagacccagacc

SEQ ID NO: 2479 - DNA, 16 bp, synthetic construct
  source 1..16: mol_type = other DNA
gtataccttgccagca

SEQ ID NO: 2480 - DNA, 16 bp, synthetic construct
  source 1..16: mol_type = other DNA
gtcagaatgcctagac

SEQ ID NO: 2481 - DNA, 16 bp, synthetic construct
  source 1..16: mol_type = other DNA
gtagacccagacccta

SEQ ID NO: 2482 - DNA, 16 bp, synthetic construct
  source 1..16: mol_type = other DNA
gtaagttcagatggcc

SEQ ID NO: 2483 - DNA, 16 bp, synthetic construct
  source 1..16: mol_type = other DNA
tggcaattagattacc

SEQ ID NO: 2484 - DNA, 16 bp, synthetic construct
  source 1..16: mol_type = other DNA
gtacacttgctaagac

SEQ ID NO: 2485 - DNA, 16 bp, synthetic construct
  source 1..16: mol_type = other DNA
gcaccattgagctatc

SEQ ID NO: 2486 - DNA, 16 bp, synthetic construct
  source 1..16: mol_type = other DNA
gaaccttgtgtcctaa

SEQ ID NO: 2487 - DNA, 16 bp, synthetic construct
  source 1..16: mol_type = other DNA
ctggagcattaaacct

SEQ ID NO: 2488 - DNA, 16 bp, synthetic construct
  source 1..16: mol_type = other DNA
cttgaccattagctgc

SEQ ID NO: 2489 - DNA, 16 bp, synthetic construct
  source 1..16: mol_type = other DNA
gatgccagacttgtat

SEQ ID NO: 2490 - DNA, 16 bp, synthetic construct
  source 1..16: mol_type = other DNA
actgatgatagtgctc

SEQ ID NO: 2491 - DNA, 16 bp, synthetic construct
  source 1..16: mol_type = other DNA
ggactaaccaaccacc

SEQ ID NO: 2492 - DNA, 16 bp, synthetic construct
  source 1..16: mol_type = other DNA
gatccaactgaaccac

SEQ ID NO: 2493 - DNA, 16 bp, synthetic construct
  source 1..16: mol_type = other DNA
tctggttaggtatgac

SEQ ID NO: 2494 - DNA, 16 bp, synthetic construct
  source 1..16: mol_type = other DNA
agcctacagttagatc

SEQ ID NO: 2495 - DNA, 16 bp, synthetic construct
  source 1..16: mol_type = other DNA
gccctgccactagata

SEQ ID NO: 2496 - DNA, 16 bp, synthetic construct
  source 1..16: mol_type = other DNA
gcctagttaaacactc

SEQ ID NO: 2497 - DNA, 16 bp, synthetic construct
  source 1..16: mol_type = other DNA
aatagtgctctcctac

SEQ ID NO: 2498 - DNA, 16 bp, synthetic construct
  source 1..16: mol_type = other DNA
gtaccagggcaatcat

SEQ ID NO: 2499 - DNA, 16 bp, synthetic construct
  source 1..16: mol_type = other DNA
gagacttgcagcctac

SEQ ID NO: 2500 - DNA, 16 bp, synthetic construct
  source 1..16: mol_type = other DNA
ggagtttatcacaacc

SEQ ID NO: 2501 - DNA, 16 bp, synthetic construct
  source 1..16: mol_type = other DNA
gaactctagtccactt

SEQ ID NO: 2502 - DNA, 16 bp, synthetic construct
  source 1..16: mol_type = other DNA
actctagtccacttgg

SEQ ID NO: 2503 - DNA, 16 bp, synthetic construct
  source 1..16: mol_type = other DNA
aactctagtccacttg

SEQ ID NO: 2504 - DNA, 16 bp, synthetic construct
  source 1..16: mol_type = other DNA
ggctaatcctttgcac

SEQ ID NO: 2505 - DNA, 16 bp, synthetic construct
  source 1..16: mol_type = other DNA
taccagggcaatcatc

SEQ ID NO: 2506 - DNA, 16 bp, synthetic construct
  source 1..16: mol_type = other DNA
ccttatccagtgcaac

SEQ ID NO: 2507 - DNA, 16 bp, synthetic construct
  source 1..16: mol_type = other DNA
gtatgccagttcacac

SEQ ID NO: 2508 - DNA, 16 bp, synthetic construct
  source 1..16: mol_type = other DNA
agctactgaccatgtc

SEQ ID NO: 2509 - DNA, 16 bp, synthetic construct
  source 1..16: mol_type = other DNA
agtcccacattgtagc

SEQ ID NO: 2510 - DNA, 16 bp, synthetic construct
  source 1..16: mol_type = other DNA
tgttgtgtgaccaccc

SEQ ID NO: 2511 - DNA, 16 bp, synthetic construct
  source 1..16: mol_type = other DNA
tcattggtaggtcaga

SEQ ID NO: 2512 - DNA, 16 bp, synthetic construct
  source 1..16: mol_type = other DNA
gacttgataagcccac

SEQ ID NO: 2513 - DNA, 16 bp, synthetic construct
  source 1..16: mol_type = other DNA
gatcctgattgagacc

SEQ ID NO: 2514 - DNA, 16 bp, synthetic construct
  source 1..16: mol_type = other DNA
aatgggtgtaggttcc

SEQ ID NO: 2515 - DNA, 16 bp, synthetic construct
  source 1..16: mol_type = other DNA
ctgatgatagtgctcc

SEQ ID NO: 2516 - DNA, 16 bp, synthetic construct
  source 1..16: mol_type = other DNA
agaccatcataccacc

SEQ ID NO: 2517 - DNA, 16 bp, synthetic construct
  source 1..16: mol_type = other DNA
caaagtgccctactgc

SEQ ID NO: 2518 - DNA, 16 bp, synthetic construct
  source 1..16: mol_type = other DNA
tgagagtggacctaat

SEQ ID NO: 2519 - DNA, 16 bp, synthetic construct
  source 1..16: mol_type = other DNA
ctaacccatactgagc

SEQ ID NO: 2520 - DNA, 16 bp, synthetic construct
  source 1..16: mol_type = other DNA
tcctccataggtcagc

SEQ ID NO: 2521 - DNA, 16 bp, synthetic construct
  source 1..16: mol_type = other DNA
atatggatgctacctc

SEQ ID NO: 2522 - DNA, 16 bp, synthetic construct
  source 1..16: mol_type = other DNA
ggatgctacctctgtt

SEQ ID NO: 2523 - DNA, 16 bp, synthetic construct
  source 1..16: mol_type = other DNA
gtctagggtggtcaac

SEQ ID NO: 2524 - DNA, 16 bp, synthetic construct
  source 1..16: mol_type = other DNA
cttaagattgtgtccc

SEQ ID NO: 2525 - DNA, 16 bp, synthetic construct
  source 1..16: mol_type = other DNA
gatagaagtccctgac

SEQ ID NO: 2526 - DNA, 16 bp, synthetic construct
  source 1..16: mol_type = other DNA
tagttaccacaccagt

SEQ ID NO: 2527 - DNA, 16 bp, synthetic construct
  source 1..16: mol_type = other DNA
gcactatgctcaacct

SEQ ID NO: 2528 - DNA, 16 bp, synthetic construct
  source 1..16: mol_type = other DNA
agtgtgccaatcaccc

SEQ ID NO: 2529 - DNA, 16 bp, synthetic construct
  source 1..16: mol_type = other DNA
cagataagtgccctat

SEQ ID NO: 2530 - DNA, 16 bp, synthetic construct
  source 1..16: mol_type = other DNA
gactggagcattaaac

SEQ ID NO: 2531 - DNA, 16 bp, synthetic construct
  source 1..16: mol_type = other DNA
ggtaaacccataactc

SEQ ID NO: 2532 - DNA, 16 bp, synthetic construct
  source 1..16: mol_type = other DNA
acttcagtaggaaccc

SEQ ID NO: 2533 - DNA, 16 bp, synthetic construct
  source 1..16: mol_type = other DNA
gcatatccactgatca

SEQ ID NO: 2534 - DNA, 16 bp, synthetic construct
  source 1..16: mol_type = other DNA
caattgtcaaagggcc

SEQ ID NO: 2535 - DNA, 16 bp, synthetic construct
  source 1..16: mol_type = other DNA
gtctggttaggtatga

SEQ ID NO: 2536 - DNA, 16 bp, synthetic construct
  source 1..16: mol_type = other DNA
gtggattctccctagt

SEQ ID NO: 2537 - DNA, 16 bp, synthetic construct
  source 1..16: mol_type = other DNA
atcctgattgagaccc

SEQ ID NO: 2538 - DNA, 16 bp, synthetic construct
  source 1..16: mol_type = other DNA
gacaatgcagacccta

SEQ ID NO: 2539 - DNA, 16 bp, synthetic construct
  source 1..16: mol_type = other DNA
accctagtgtcatttg

SEQ ID NO: 2540 - DNA, 16 bp, synthetic construct
  source 1..16: mol_type = other DNA
cctatcagaggtgtga

SEQ ID NO: 2541 - DNA, 16 bp, synthetic construct
  source 1..16: mol_type = other DNA
tgcataatgacctgac

SEQ ID NO: 2542 - DNA, 16 bp, synthetic construct
  source 1..16: mol_type = other DNA
gcagcccttgtagctt

SEQ ID NO: 2543 - DNA, 16 bp, synthetic construct
  source 1..16: mol_type = other DNA
ggatcttgcccatcac

SEQ ID NO: 2544 - DNA, 16 bp, synthetic construct
  source 1..16: mol_type = other DNA
gtgctacctgacaaga

SEQ ID NO: 2545 - DNA, 16 bp, synthetic construct
  source 1..16: mol_type = other DNA
ttagcccagtaatcac

SEQ ID NO: 2546 - DNA, 16 bp, synthetic construct
  source 1..16: mol_type = other DNA
ctagggactcaaatgc

SEQ ID NO: 2547 - DNA, 16 bp, synthetic construct
  source 1..16: mol_type = other DNA
gcctacagttagatct

SEQ ID NO: 2548 - DNA, 16 bp, synthetic construct
  source 1..16: mol_type = other DNA
gaatgtatcaagcctc

SEQ ID NO: 2549 - DNA, 16 bp, synthetic construct
  source 1..16: mol_type = other DNA
gacttgccactgaacc

SEQ ID NO: 2550 - DNA, 16 bp, synthetic construct
  source 1..16: mol_type = other DNA
tagccagagtgtagat

SEQ ID NO: 2551 - DNA, 16 bp, synthetic construct
  source 1..16: mol_type = other DNA
gatgagtatcactacc

SEQ ID NO: 2552 - DNA, 16 bp, synthetic construct
  source 1..16: mol_type = other DNA
gagacccttagaatcc

SEQ ID NO: 2553 - DNA, 16 bp, synthetic construct
  source 1..16: mol_type = other DNA
caagtaatggtgtgca

SEQ ID NO: 2554 - DNA, 16 bp, synthetic construct
  source 1..16: mol_type = other DNA
gccctagaatgttgac

SEQ ID NO: 2555 - DNA, 16 bp, synthetic construct
  source 1..16: mol_type = other DNA
gatgtacctagaaggc

SEQ ID NO: 2556 - DNA, 16 bp, synthetic construct
  source 1..16: mol_type = other DNA
gagacttgataagccc

SEQ ID NO: 2557 - DNA, 16 bp, synthetic construct
  source 1..16: mol_type = other DNA
gccagacttagatgct

SEQ ID NO: 2558 - DNA, 16 bp, synthetic construct
  source 1..16: mol_type = other DNA
ctaggatgcttcaggt

SEQ ID NO: 2559 - DNA, 16 bp, synthetic construct
  source 1..16: mol_type = other DNA
cagcccttgtagctta

SEQ ID NO: 2560 - DNA, 16 bp, synthetic construct
  source 1..16: mol_type = other DNA
ttggatgtacttaggc

SEQ ID NO: 2561 - DNA, 16 bp, synthetic construct
  source 1..16: mol_type = other DNA
gtgaaccctctaatga

SEQ ID NO: 2562 - DNA, 16 bp, synthetic construct
  source 1..16: mol_type = other DNA
ggattgggcaactgtt

SEQ ID NO: 2563 - DNA, 16 bp, synthetic construct
  source 1..16: mol_type = other DNA
gaaccaaccaataggc

SEQ ID NO: 2564 - DNA, 16 bp, synthetic construct
  source 1..16: mol_type = other DNA
  modified_base 1..3: mod_base = OTHER; note = locked nucleic acid
  modified_base 15..16: mod_base = OTHER; note = locked nucleic acid
  modified_base 1..16: mod_base = OTHER; note = phosphorothioate linkage
  misc_feature 1..3: note = RNA
  misc_feature 4..14: note = DNA
  misc_feature 15..16: note = RNA
gccacaacctacttat

SEQ ID NO: 2565 - DNA, 16 bp, synthetic construct
  source 1..16: mol_type = other DNA
  modified_base 1..3: mod_base = OTHER; note = locked nucleic acid
  modified_base 15..16: mod_base = OTHER; note = locked nucleic acid
  modified_base 1..16: mod_base = OTHER; note = phosphorothioate linkage
  misc_feature 1..3: note = RNA
  misc_feature 4..14: note = DNA
  misc_feature 15..16: note = RNA
gacacatactactggt

SEQ ID NO: 2566 - DNA, 16 bp, synthetic construct
  source 1..16: mol_type = other DNA
  modified_base 1..3: mod_base = OTHER; note = locked nucleic acid
  modified_base 15..16: mod_base = OTHER; note = locked nucleic acid
  modified_base 1..16: mod_base = OTHER; note = phosphorothioate linkage
  misc_feature 1..3: note = RNA
  misc_feature 4..14: note = DNA
  misc_feature 15..16: note = RNA
ctactaagtgtcatcc

SEQ ID NO: 2567 - DNA, 15 bp, synthetic construct
  source 1..15: mol_type = other DNA
  modified_base 1..3: mod_base = OTHER; note = locked nucleic acid
  modified_base 14..15: mod_base = OTHER; note = locked nucleic acid
  modified_base 1..15: mod_base = OTHER; note = phosphorothioate linkage
  misc_feature 1..3: note = RNA
  misc_feature 4..13: note = DNA
  misc_feature 14..15: note = RNA
aacacgtctatacgc

SEQ ID NO: 2568-2602 - skipped (35 entries)

SEQ ID NO: 2603 - DNA, 16 bp, synthetic construct
  source 1..16: mol_type = other DNA
catctgtgagttcccg

SEQ ID NO: 2604 - DNA, 16 bp, synthetic construct
  source 1..16: mol_type = other DNA
atctgtgagttcccgt

SEQ ID NO: 2605 - DNA, 16 bp, synthetic construct
  source 1..16: mol_type = other DNA
tgtgagttcccgtcca

SEQ ID NO: 2606 - DNA, 16 bp, synthetic construct
  source 1..16: mol_type = other DNA
catggttgggcgtctg

SEQ ID NO: 2607 - DNA, 16 bp, synthetic construct
  source 1..16: mol_type = other DNA
atggttgggcgtctgc

SEQ ID NO: 2608 - DNA, 16 bp, synthetic construct
  source 1..16: mol_type = other DNA
tggttgggcgtctgca

SEQ ID NO: 2609 - DNA, 16 bp, synthetic construct
  source 1..16: mol_type = other DNA
caacacggagaccaca

SEQ ID NO: 2610 - DNA, 16 bp, synthetic construct
  source 1..16: mol_type = other DNA
acacggagaccacatt

SEQ ID NO: 2611 - DNA, 16 bp, synthetic construct
  source 1..16: mol_type = other DNA
cacggagaccacattt

SEQ ID NO: 2612 - DNA, 16 bp, synthetic construct
  source 1..16: mol_type = other DNA
ttaggtcactatggga

SEQ ID NO: 2613 - DNA, 16 bp, synthetic construct
  source 1..16: mol_type = other DNA
taggtcactatgggag

SEQ ID NO: 2614 - DNA, 16 bp, synthetic construct
  source 1..16: mol_type = other DNA
gtctgtcgggtaattg

SEQ ID NO: 2615 - DNA, 16 bp, synthetic construct
  source 1..16: mol_type = other DNA
tctgtcgggtaattga

SEQ ID NO: 2616 - DNA, 16 bp, synthetic construct
  source 1..16: mol_type = other DNA
ctgtcgggtaattgaa

SEQ ID NO: 2617 - DNA, 16 bp, synthetic construct
  source 1..16: mol_type = other DNA
tgtcgggtaattgaat

SEQ ID NO: 2618 - DNA, 16 bp, synthetic construct
  source 1..16: mol_type = other DNA
gtcgggtaattgaatg

SEQ ID NO: 2619 - DNA, 16 bp, synthetic construct
  source 1..16: mol_type = other DNA
tcgggtaattgaatga

SEQ ID NO: 2620 - DNA, 16 bp, synthetic construct
  source 1..16: mol_type = other DNA
cgggtaattgaatgac

SEQ ID NO: 2621 - DNA, 16 bp, synthetic construct
  source 1..16: mol_type = other DNA
gcttgtcacgggtcag

SEQ ID NO: 2622 - DNA, 16 bp, synthetic construct
  source 1..16: mol_type = other DNA
cttgtcacgggtcagt

SEQ ID NO: 2623 - DNA, 16 bp, synthetic construct
  source 1..16: mol_type = other DNA
taagtccatgtttgcg

SEQ ID NO: 2624 - DNA, 16 bp, synthetic construct
  source 1..16: mol_type = other DNA
aagtccatgtttgcgg

SEQ ID NO: 2625 - DNA, 16 bp, synthetic construct
  source 1..16: mol_type = other DNA
agtccatgtttgcggg

SEQ ID NO: 2626 - DNA, 16 bp, synthetic construct
  source 1..16: mol_type = other DNA
gtccatgtttgcggga

SEQ ID NO: 2627 - DNA, 16 bp, synthetic construct
  source 1..16: mol_type = other DNA
tccatgtttgcgggaa

SEQ ID NO: 2628 - DNA, 16 bp, synthetic construct
  source 1..16: mol_type = other DNA
ccatgtttgcgggaac

SEQ ID NO: 2629 - DNA, 16 bp, synthetic construct
  source 1..16: mol_type = other DNA
catgtttgcgggaacc

SEQ ID NO: 2630 - DNA, 16 bp, synthetic construct
  source 1..16: mol_type = other DNA
atgtttgcgggaacct

SEQ ID NO: 2631 - DNA, 16 bp, synthetic construct
  source 1..16: mol_type = other DNA
tgtttgcgggaaccta

SEQ ID NO: 2632 - DNA, 16 bp, synthetic construct
  source 1..16: mol_type = other DNA
gtttgcgggaacctaa

SEQ ID NO: 2633 - DNA, 16 bp, synthetic construct
  source 1..16: mol_type = other DNA
tttgcgggaacctaag

SEQ ID NO: 2634 - DNA, 16 bp, synthetic construct
  source 1..16: mol_type = other DNA
ggccacgctctttgat

SEQ ID NO: 2635 - DNA, 16 bp, synthetic construct
  source 1..16: mol_type = other DNA
gatgcgatgttggtca

SEQ ID NO: 2636 - DNA, 16 bp, synthetic construct
  source 1..16: mol_type = other DNA
gagatgatgtgatcgc

SEQ ID NO: 2637 - DNA, 16 bp, synthetic construct
  source 1..16: mol_type = other DNA
agatgatgtgatcgcc

SEQ ID NO: 2638 - DNA, 16 bp, synthetic construct
  source 1..16: mol_type = other DNA
gatgatgtgatcgccc

SEQ ID NO: 2639 - DNA, 16 bp, synthetic construct
  source 1..16: mol_type = other DNA
atgatgtgatcgccct

SEQ ID NO: 2640 - DNA, 16 bp, synthetic construct
  source 1..16: mol_type = other DNA
tgatgtgatcgccctt

SEQ ID NO: 2641 - DNA, 16 bp, synthetic construct
  source 1..16: mol_type = other DNA
gatgtgatcgcccttg

SEQ ID NO: 2642 - DNA, 16 bp, synthetic construct
  source 1..16: mol_type = other DNA
atgtgatcgcccttgg

SEQ ID NO: 2643 - DNA, 16 bp, synthetic construct
  source 1..16: mol_type = other DNA
gctgttcgcaacttgg

SEQ ID NO: 2644 - DNA, 16 bp, synthetic construct
  source 1..16: mol_type = other DNA
ctgttcgcaacttggt

SEQ ID NO: 2645 - DNA, 16 bp, synthetic construct
  source 1..16: mol_type = other DNA
tgttcgcaacttggta

SEQ ID NO: 2646 - DNA, 16 bp, synthetic construct
  source 1..16: mol_type = other DNA
gttcgcaacttggtac

SEQ ID NO: 2647 - DNA, 16 bp, synthetic construct
  source 1..16: mol_type = other DNA
gcaacttggtacgaat

SEQ ID NO: 2648 - DNA, 16 bp, synthetic construct
  source 1..16: mol_type = other DNA
caacttggtacgaatg

SEQ ID NO: 2649 - DNA, 20 bp, synthetic construct
  source 1..20: mol_type = other DNA
atggctcaatttacatgaca

SEQ ID NO: 2650 - DNA, 20 bp, synthetic construct
  source 1..20: mol_type = other DNA
cacgtccagaatatgcaaat

SEQ ID NO: 2651 - DNA, 20 bp, synthetic construct
  source 1..20: mol_type = other DNA
acgtccagaatatgcaaatt

SEQ ID NO: 2652 - DNA, 20 bp, synthetic construct
  source 1..20: mol_type = other DNA
ggtgaattgaatagcatgtg

SEQ ID NO: 2653 - DNA, 20 bp, synthetic construct
  source 1..20: mol_type = other DNA
caactgaacaaatgcgtggc

SEQ ID NO: 2654 - DNA, 20 bp, synthetic construct
  source 1..20: mol_type = other DNA
aactgaacaaatgcgtggca

SEQ ID NO: 2655 - DNA, 20 bp, synthetic construct
  source 1..20: mol_type = other DNA
actgaacaaatgcgtggcag

SEQ ID NO: 2656 - DNA, 20 bp, synthetic construct
  source 1..20: mol_type = other DNA
ctgaacaaatgcgtggcagg

SEQ ID NO: 2657 - DNA, 20 bp, synthetic construct
  source 1..20: mol_type = other DNA
caaatgcgtggcaggaatat

SEQ ID NO: 2658 - DNA, 20 bp, synthetic construct
  source 1..20: mol_type = other DNA
tgcgtggcaggaatataaac

SEQ ID NO: 2659 - DNA, 20 bp, synthetic construct
  source 1..20: mol_type = other DNA
acaacagatgttcatttctc

SEQ ID NO: 2660 - DNA, 20 bp, synthetic construct
  source 1..20: mol_type = other DNA
caacagatgttcatttctca

SEQ ID NO: 2661 - DNA, 20 bp, synthetic construct
  source 1..20: mol_type = other DNA
aacagatgttcatttctcac

SEQ ID NO: 2662 - DNA, 20 bp, synthetic construct
  source 1..20: mol_type = other DNA
acagatgttcatttctcaca

SEQ ID NO: 2663 - DNA, 20 bp, synthetic construct
  source 1..20: mol_type = other DNA
cagatgttcatttctcacag

SEQ ID NO: 2664 - DNA, 20 bp, synthetic construct
  source 1..20: mol_type = other DNA
agatgttcatttctcacagt

SEQ ID NO: 2665 - DNA, 20 bp, synthetic construct
  source 1..20: mol_type = other DNA
gatgttcatttctcacagtt

SEQ ID NO: 2666 - DNA, 20 bp, synthetic construct
  source 1..20: mol_type = other DNA
ttacagcagtgacgggaaac

SEQ ID NO: 2667 - DNA, 20 bp, synthetic construct
  source 1..20: mol_type = other DNA
tacagcagtgacgggaaact

SEQ ID NO: 2668 - DNA, 20 bp, synthetic construct
  source 1..20: mol_type = other DNA
gtgacgggaaactgacacat

SEQ ID NO: 2669 - DNA, 20 bp, synthetic construct
  source 1..20: mol_type = other DNA
tgacgggaaactgacacatg

SEQ ID NO: 2670 - DNA, 20 bp, synthetic construct
  source 1..20: mol_type = other DNA
tcagttgcttggagtctgtt

SEQ ID NO: 2671 - DNA, 20 bp, synthetic construct
  source 1..20: mol_type = other DNA
cagttgcttggagtctgttc

SEQ ID NO: 2672 - DNA, 20 bp, synthetic construct
  source 1..20: mol_type = other DNA
agttgcttggagtctgttca

SEQ ID NO: 2673 - DNA, 20 bp, synthetic construct
  source 1..20: mol_type = other DNA
gcttggagtctgttcagcag

SEQ ID NO: 2674 - DNA, 20 bp, synthetic construct
  source 1..20: mol_type = other DNA
cttggagtctgttcagcagc

SEQ ID NO: 2675 - DNA, 20 bp, synthetic construct
  source 1..20: mol_type = other DNA
tctatgttctgagttgatgt

SEQ ID NO: 2676 - DNA, 20 bp, synthetic construct
  source 1..20: mol_type = other DNA
ctatgttctgagttgatgtc

SEQ ID NO: 2677 - DNA, 20 bp, synthetic construct
  source 1..20: mol_type = other DNA
tatgttctgagttgatgtct

SEQ ID NO: 2678 - DNA, 20 bp, synthetic construct
  source 1..20: mol_type = other DNA
atgttctgagttgatgtctt

SEQ ID NO: 2679 - DNA, 20 bp, synthetic construct
  source 1..20: mol_type = other DNA
tgttctgagttgatgtcttg

SEQ ID NO: 2680 - DNA, 20 bp, synthetic construct
  source 1..20: mol_type = other DNA
gttctgagttgatgtcttga

SEQ ID NO: 2681 - DNA, 20 bp, synthetic construct
  source 1..20: mol_type = other DNA
atccatgagtgtgatgttta

SEQ ID NO: 2682 - DNA, 20 bp, synthetic construct
  source 1..20: mol_type = other DNA
tccatgagtgtgatgtttag

SEQ ID NO: 2683 - DNA, 20 bp, synthetic construct
  source 1..20: mol_type = other DNA
ccatgagtgtgatgtttagg

SEQ ID NO: 2684 - DNA, 20 bp, synthetic construct
  source 1..20: mol_type = other DNA
catgagtgtgatgtttaggc

SEQ ID NO: 2685 - DNA, 20 bp, synthetic construct
  source 1..20: mol_type = other DNA
atgagtgtgatgtttaggct

SEQ ID NO: 2686 - DNA, 20 bp, synthetic construct
  source 1..20: mol_type = other DNA
tgagtgtgatgtttaggctg

SEQ ID NO: 2687 - DNA, 20 bp, synthetic construct
  source 1..20: mol_type = other DNA
gagtgtgatgtttaggctga

SEQ ID NO: 2688 - DNA, 20 bp, synthetic construct
  source 1..20: mol_type = other DNA
agtgtgatgtttaggctgag

SEQ ID NO: 2689 - DNA, 20 bp, synthetic construct
  source 1..20: mol_type = other DNA
gtgtgatgtttaggctgaga

SEQ ID NO: 2690 - DNA, 20 bp, synthetic construct
  source 1..20: mol_type = other DNA
tgtgatgtttaggctgagag

SEQ ID NO: 2691 - DNA, 20 bp, synthetic construct
  source 1..20: mol_type = other DNA
gtgatgtttaggctgagagt

SEQ ID NO: 2692 - DNA, 20 bp, synthetic construct
  source 1..20: mol_type = other DNA
tgatgtttaggctgagagta

SEQ ID NO: 2693 - DNA, 20 bp, synthetic construct
  source 1..20: mol_type = other DNA
gatgtttaggctgagagtag

SEQ ID NO: 2694 - DNA, 20 bp, synthetic construct
  source 1..20: mol_type = other DNA
gccctgatacgactgttctg

SEQ ID NO: 2695 - DNA, 20 bp, synthetic construct
  source 1..20: mol_type = other DNA
ccctgatacgactgttctgt

SEQ ID NO: 2696 - DNA, 20 bp, synthetic construct
  source 1..20: mol_type = other DNA
cctgatacgactgttctgtg

SEQ ID NO: 2697 - DNA, 20 bp, synthetic construct
  source 1..20: mol_type = other DNA
ctgatacgactgttctgtgg

SEQ ID NO: 2698 - DNA, 20 bp, synthetic construct
  source 1..20: mol_type = other DNA
tgatacgactgttctgtggc

SEQ ID NO: 2699 - DNA, 20 bp, synthetic construct
  source 1..20: mol_type = other DNA
gatacgactgttctgtggct

SEQ ID NO: 2700 - DNA, 20 bp, synthetic construct
  source 1..20: mol_type = other DNA
atacgactgttctgtggctc

SEQ ID NO: 2701 - DNA, 20 bp, synthetic construct
  source 1..20: mol_type = other DNA
tacgactgttctgtggctct

SEQ ID NO: 2702-2724 - skipped (23 entries)

SEQ ID NO: 2725 - DNA, 20 bp, synthetic construct
  source 1..20: mol_type = other DNA
gtggctctgatgtgactctt

SEQ ID NO: 2726 - DNA, 20 bp, synthetic construct
  source 1..20: mol_type = other DNA
tggctctgatgtgactcttc

SEQ ID NO: 2727 - DNA, 20 bp, synthetic construct
  source 1..20: mol_type = other DNA
ggctctgatgtgactcttct

SEQ ID NO: 2728 - DNA, 20 bp, synthetic construct
  source 1..20: mol_type = other DNA
gctctgatgtgactcttctg

SEQ ID NO: 2729 - DNA, 20 bp, synthetic construct
  source 1..20: mol_type = other DNA
tctgatgtgactcttctgtg

SEQ ID NO: 2730 - DNA, 20 bp, synthetic construct
  source 1..20: mol_type = other DNA
ctgatgtgactcttctgtgg

SEQ ID NO: 2731 - DNA, 20 bp, synthetic construct
  source 1..20: mol_type = other DNA
tgatgtgactcttctgtggc

SEQ ID NO: 2732 - DNA, 20 bp, synthetic construct
  source 1..20: mol_type = other DNA
gatgtgactcttctgtggct

SEQ ID NO: 2733 - DNA, 20 bp, synthetic construct
  source 1..20: mol_type = other DNA
gacgtgaagcaaagacactc

SEQ ID NO: 2734 - DNA, 20 bp, synthetic construct
  source 1..20: mol_type = other DNA
tgtgtctcaattaatttgcc

SEQ ID NO: 2735 - DNA, 20 bp, synthetic construct
  source 1..20: mol_type = other DNA
gtgtctcaattaatttgccg

SEQ ID NO: 2736 - DNA, 20 bp, synthetic construct
  source 1..20: mol_type = other DNA
tgtctcaattaatttgccgt

SEQ ID NO: 2737 - DNA, 20 bp, synthetic construct
  source 1..20: mol_type = other DNA
gtctcaattaatttgccgtg

SEQ ID NO: 2738 - DNA, 20 bp, synthetic construct
  source 1..20: mol_type = other DNA
tctcaattaatttgccgtgt

SEQ ID NO: 2739 - DNA, 20 bp, synthetic construct
  source 1..20: mol_type = other DNA
ctcaattaatttgccgtgta

SEQ ID NO: 2740 - DNA, 20 bp, synthetic construct
  source 1..20: mol_type = other DNA
gcctgctctggtggacggta

SEQ ID NO: 2741 - DNA, 20 bp, synthetic construct
  source 1..20: mol_type = other DNA
ggcagcaggactctgaggac

SEQ ID NO: 2742 - DNA, 20 bp, synthetic construct
  source 1..20: mol_type = other DNA
ggcacaaggattggtggtgt

SEQ ID NO: 2743 - DNA, 20 bp, synthetic construct
  source 1..20: mol_type = other DNA
gcacaaggattggtggtgtc

SEQ ID NO: 2744 - DNA, 20 bp, synthetic construct
  source 1..20: mol_type = other DNA
cacaaggattggtggtgtct

SEQ ID NO: 2745 - DNA, 20 bp, synthetic construct
  source 1..20: mol_type = other DNA
acaaggattggtggtgtctg

SEQ ID NO: 2746 - DNA, 20 bp, synthetic construct
  source 1..20: mol_type = other DNA
caaggattggtggtgtctgc

SEQ ID NO: 2747 - DNA, 20 bp, synthetic construct
  source 1..20: mol_type = other DNA
aaggattggtggtgtctgcc

SEQ ID NO: 2748 - DNA, 20 bp, synthetic construct
  source 1..20: mol_type = other DNA
aggattggtggtgtctgcct

SEQ ID NO: 2749 - DNA, 20 bp, synthetic construct
  source 1..20: mol_type = other DNA
ggattggtggtgtctgcctg

SEQ ID NO: 2750 - DNA, 20 bp, synthetic construct
  source 1..20: mol_type = other DNA
gattggtggtgtctgcctga

SEQ ID NO: 2751 - DNA, 20 bp, synthetic construct
  source 1..20: mol_type = other DNA
attggtggtgtctgcctgaa

SEQ ID NO: 2752 - DNA, 20 bp, synthetic construct
  source 1..20: mol_type = other DNA
ttggtggtgtctgcctgaag

SEQ ID NO: 2753 - DNA, 20 bp, synthetic construct
  source 1..20: mol_type = other DNA
catctgtgagttcccgtcca

SEQ ID NO: 2754 - DNA, 20 bp, synthetic construct
  source 1..20: mol_type = other DNA
cccaccttcagactttcaag

SEQ ID NO: 2755 - DNA, 20 bp, synthetic construct
  source 1..20: mol_type = other DNA
ccaccttcagactttcaaga

SEQ ID NO: 2756 - DNA, 20 bp, synthetic construct
  source 1..20: mol_type = other DNA
ttggctgcgtgtcctggtgt

SEQ ID NO: 2757 - DNA, 20 bp, synthetic construct
  source 1..20: mol_type = other DNA
tggctgcgtgtcctggtgtc

SEQ ID NO: 2758 - DNA, 20 bp, synthetic construct
  source 1..20: mol_type = other DNA
ggctgcgtgtcctggtgtct

SEQ ID NO: 2759 - DNA, 20 bp, synthetic construct
  source 1..20: mol_type = other DNA
gctgcgtgtcctggtgtctg

SEQ ID NO: 2760 - DNA, 20 bp, synthetic construct
  source 1..20: mol_type = other DNA
ctgcgtgtcctggtgtctgt

SEQ ID NO: 2761 - DNA, 20 bp, synthetic construct
  source 1..20: mol_type = other DNA
tgcgtgtcctggtgtctgtc

SEQ ID NO: 2762 - DNA, 20 bp, synthetic construct
  source 1..20: mol_type = other DNA
gcgtgtcctggtgtctgtca

SEQ ID NO: 2763 - DNA, 20 bp, synthetic construct
  source 1..20: mol_type = other DNA
tacagtcagctcttcttgag

SEQ ID NO: 2764 - DNA, 20 bp, synthetic construct
  source 1..20: mol_type = other DNA
ctcttcttgagtattggaat

SEQ ID NO: 2765 - DNA, 20 bp, synthetic construct
  source 1..20: mol_type = other DNA
cagtggttctgtatgtctaa

SEQ ID NO: 2766 - DNA, 20 bp, synthetic construct
  source 1..20: mol_type = other DNA
agtggttctgtatgtctaac

SEQ ID NO: 2767 - DNA, 20 bp, synthetic construct
  source 1..20: mol_type = other DNA
gtggttctgtatgtctaact

SEQ ID NO: 2768 - DNA, 20 bp, synthetic construct
  source 1..20: mol_type = other DNA
tggttctgtatgtctaactc

SEQ ID NO: 2769 - DNA, 20 bp, synthetic construct
  source 1..20: mol_type = other DNA
ggttctgtatgtctaactct

SEQ ID NO: 2770 - DNA, 20 bp, synthetic construct
  source 1..20: mol_type = other DNA
gttctgtatgtctaactcta

SEQ ID NO: 2771 - DNA, 20 bp, synthetic construct
  source 1..20: mol_type = other DNA
tgtatgtctaactctatctg

SEQ ID NO: 2772 - DNA, 20 bp, synthetic construct
  source 1..20: mol_type = other DNA
gtatgtctaactctatctga

SEQ ID NO: 2773 - DNA, 20 bp, synthetic construct
  source 1..20: mol_type = other DNA
cttgtttcttaaaggatctg

SEQ ID NO: 2774 - DNA, 20 bp, synthetic construct
  source 1..20: mol_type = other DNA
ttgtttcttaaaggatctgg

SEQ ID NO: 2775 - DNA, 20 bp, synthetic construct
  source 1..20: mol_type = other DNA
tgtttcttaaaggatctgga

SEQ ID NO: 2776 - DNA, 20 bp, synthetic construct
  source 1..20: mol_type = other DNA
gtttcttaaaggatctggac

SEQ ID NO: 2777 - DNA, 20 bp, synthetic construct
  source 1..20: mol_type = other DNA
gactttaggtcactatggga

SEQ ID NO: 2778 - DNA, 20 bp, synthetic construct
  source 1..20: mol_type = other DNA
actttaggtcactatgggag

SEQ ID NO: 2779 - DNA, 20 bp, synthetic construct
  source 1..20: mol_type = other DNA
ctttaggtcactatgggagt

SEQ ID NO: 2780 - DNA, 20 bp, synthetic construct
  source 1..20: mol_type = other DNA
tttaggtcactatgggagtc

SEQ ID NO: 2781 - DNA, 20 bp, synthetic construct
  source 1..20: mol_type = other DNA
cttaagcatctctagtccaa

SEQ ID NO: 2782 - DNA, 20 bp, synthetic construct
  source 1..20: mol_type = other DNA
ttaagcatctctagtccaaa

SEQ ID NO: 2783 - DNA, 20 bp, synthetic construct
  source 1..20: mol_type = other DNA
taagcatctctagtccaaac

SEQ ID NO: 2784 - DNA, 20 bp, synthetic construct
  source 1..20: mol_type = other DNA
atgtctgtcgggtaattgaa

SEQ ID NO: 2785 - DNA, 20 bp, synthetic construct
  source 1..20: mol_type = other DNA
tgtctgtcgggtaattgaat

SEQ ID NO: 2786 - DNA, 20 bp, synthetic construct
  source 1..20: mol_type = other DNA
gtctgtcgggtaattgaatg

SEQ ID NO: 2787 - DNA, 20 bp, synthetic construct
  source 1..20: mol_type = other DNA
tctgtcgggtaattgaatga

SEQ ID NO: 2788 - DNA, 20 bp, synthetic construct
  source 1..20: mol_type = other DNA
gtcgggtaattgaatgacat

SEQ ID NO: 2789 - DNA, 20 bp, synthetic construct
  source 1..20: mol_type = other DNA
gattctgaagtcattaccac

SEQ ID NO: 2790 - DNA, 20 bp, synthetic construct
  source 1..20: mol_type = other DNA
attctgaagtcattaccact

SEQ ID NO: 2791 - DNA, 20 bp, synthetic construct
  source 1..20: mol_type = other DNA
tgcgataagtccatgtttgc

SEQ ID NO: 2792 - DNA, 20 bp, synthetic construct
  source 1..20: mol_type = other DNA
gataagtccatgtttgcggg

SEQ ID NO: 2793 - DNA, 20 bp, synthetic construct
  source 1..20: mol_type = other DNA
ataagtccatgtttgcggga

SEQ ID NO: 2794 - DNA, 20 bp, synthetic construct
  source 1..20: mol_type = other DNA
taagtccatgtttgcgggaa

SEQ ID NO: 2795 - DNA, 20 bp, synthetic construct
  source 1..20: mol_type = other DNA
aagtccatgtttgcgggaac

SEQ ID NO: 2796 - DNA, 20 bp, synthetic construct
  source 1..20: mol_type = other DNA
agtccatgtttgcgggaacc

SEQ ID NO: 2797 - DNA, 20 bp, synthetic construct
  source 1..20: mol_type = other DNA
gtccatgtttgcgggaacct

SEQ ID NO: 2798 - DNA, 20 bp, synthetic construct
  source 1..20: mol_type = other DNA
tccatgtttgcgggaaccta

SEQ ID NO: 2799 - DNA, 20 bp, synthetic construct
  source 1..20: mol_type = other DNA
ccatgtttgcgggaacctaa

SEQ ID NO: 2800 - DNA, 20 bp, synthetic construct
  source 1..20: mol_type = other DNA
catgtttgcgggaacctaag

SEQ ID NO: 2801 - DNA, 20 bp, synthetic construct
  source 1..20: mol_type = other DNA
aataatcattctttgtcccg

SEQ ID NO: 2802 - DNA, 20 bp, synthetic construct
  source 1..20: mol_type = other DNA
ataatcattctttgtcccga

SEQ ID NO: 2803 - DNA, 20 bp, synthetic construct
  source 1..20: mol_type = other DNA
aatcattctttgtcccgatg

SEQ ID NO: 2804 - DNA, 20 bp, synthetic construct
  source 1..20: mol_type = other DNA
agatgatgtgatcgcccttg

SEQ ID NO: 2805 - DNA, 20 bp, synthetic construct
  source 1..20: mol_type = other DNA
gatgatgtgatcgcccttgg

SEQ ID NO: 2806 - DNA, 20 bp, synthetic construct
  source 1..20: mol_type = other DNA
cattcctgagttacattaca

SEQ ID NO: 2807 - DNA, 20 bp, synthetic construct
  source 1..20: mol_type = other DNA
tcctgagttacattacatag

SEQ ID NO: 2808 - DNA, 20 bp, synthetic construct
  source 1..20: mol_type = other DNA
cctgagttacattacataga

SEQ ID NO: 2809 - DNA, 20 bp, synthetic construct
  source 1..20: mol_type = other DNA
tacagtgttatgtgcaaatg

SEQ ID NO: 2810 - DNA, 20 bp, synthetic construct
  source 1..20: mol_type = other DNA
aaattcaacatcatcttccg

SEQ ID NO: 2811 - DNA, 20 bp, synthetic construct
  source 1..20: mol_type = other DNA
aattcaacatcatcttccgc

SEQ ID NO: 2812 - DNA, 20 bp, synthetic construct
  source 1..20: mol_type = other DNA
aacatcatcttccgctgtgt

SEQ ID NO: 2813 - DNA, 20 bp, synthetic construct
  source 1..20: mol_type = other DNA
tccatccatctgaagcctgt

SEQ ID NO: 2814 - DNA, 20 bp, synthetic construct
  source 1..20: mol_type = other DNA
ccatccatctgaagcctgtt

SEQ ID NO: 2815 - DNA, 20 bp, synthetic construct
  source 1..20: mol_type = other DNA
catccatctgaagcctgtta

SEQ ID NO: 2816 - DNA, 20 bp, synthetic construct
  source 1..20: mol_type = other DNA
atccatctgaagcctgttag

SEQ ID NO: 2817 - DNA, 20 bp, synthetic construct
  source 1..20: mol_type = other DNA
tctgaagcctgttagaattt

SEQ ID NO: 2818 - DNA, 20 bp, synthetic construct
  source 1..20: mol_type = other DNA
gcaacttggtacgaatgagt

SEQ ID NO: 2819 - DNA, 20 bp, synthetic construct
  source 1..20: mol_type = other DNA
caacttggtacgaatgagtt

SEQ ID NO: 2820 - DNA, 20 bp, synthetic construct
  source 1..20: mol_type = other DNA
tccttggacaaactcacttc

SEQ ID NO: 2821 - DNA, 20 bp, synthetic construct
  source 1..20: mol_type = other DNA
ccttggacaaactcacttct

SEQ ID NO: 2822 - DNA, 20 bp, synthetic construct
  source 1..20: mol_type = other DNA
cttggacaaactcacttctc

SEQ ID NO: 2823 - DNA, 16 bp, synthetic construct
  source 1..16: mol_type = other DNA
acaagccaagtcccac

SEQ ID NO: 2824 - DNA, 16 bp, synthetic construct
  source 1..16: mol_type = other DNA
ctggtctgctacaatg

SEQ ID NO: 2825 - DNA, 16 bp, synthetic construct
  source 1..16: mol_type = other DNA
ggtctgctacaatgat

SEQ ID NO: 2826 - DNA, 16 bp, synthetic construct
  source 1..16: mol_type = other DNA
gtctgctacaatgatc

SEQ ID NO: 2827 - DNA, 16 bp, synthetic construct
  source 1..16: mol_type = other DNA
tctgctacaatgatcc

SEQ ID NO: 2828 - DNA, 16 bp, synthetic construct
  source 1..16: mol_type = other DNA
aattgcaagtagaccc

SEQ ID NO: 2829 - DNA, 16 bp, synthetic construct
  source 1..16: mol_type = other DNA
attgcaagtagaccca

SEQ ID NO: 2830 - DNA, 16 bp, synthetic construct
  source 1..16: mol_type = other DNA
taggaactgtttagcc

SEQ ID NO: 2831 - DNA, 16 bp, synthetic construct
  source 1..16: mol_type = other DNA
gcatcgagggcatgat

SEQ ID NO: 2832 - DNA, 16 bp, synthetic construct
  source 1..16: mol_type = other DNA
catcgagggcatgata

SEQ ID NO: 2833 - DNA, 16 bp, synthetic construct
  source 1..16: mol_type = other DNA
ctagttaagggttcca

SEQ ID NO: 2834 - DNA, 16 bp, synthetic construct
  source 1..16: mol_type = other DNA
tgggtctaagataggc

SEQ ID NO: 2835 - DNA, 20 bp, synthetic construct
  source 1..20: mol_type = other DNA
aacaagccaagtcccacatt

SEQ ID NO: 2836 - DNA, 20 bp, synthetic construct
  source 1..20: mol_type = other DNA
acaagccaagtcccacattg

SEQ ID NO: 2837 - DNA, 20 bp, synthetic construct
  source 1..20: mol_type = other DNA
gccaagtcccacattgcatc

SEQ ID NO: 2838 - DNA, 20 bp, synthetic construct
  source 1..20: mol_type = other DNA
ccaagtcccacattgcatca

SEQ ID NO: 2839 - DNA, 20 bp, synthetic construct
  source 1..20: mol_type = other DNA
caagtcccacattgcatcat

SEQ ID NO: 2840 - DNA, 20 bp, synthetic construct
  source 1..20: mol_type = other DNA
aagtcccacattgcatcatc

SEQ ID NO: 2841 - DNA, 20 bp, synthetic construct
  source 1..20: mol_type = other DNA
agtcccacattgcatcatcc

SEQ ID NO: 2842 - DNA, 20 bp, synthetic construct
  source 1..20: mol_type = other DNA
ccacattgcatcatcccaca

SEQ ID NO: 2843 - DNA, 20 bp, synthetic construct
  source 1..20: mol_type = other DNA
cacattgcatcatcccacat

SEQ ID NO: 2844 - DNA, 20 bp, synthetic construct
  source 1..20: mol_type = other DNA
tttctggtctgctacaatga

SEQ ID NO: 2845 - DNA, 20 bp, synthetic construct
  source 1..20: mol_type = other DNA
ttctggtctgctacaatgat

SEQ ID NO: 2846 - DNA, 20 bp, synthetic construct
  source 1..20: mol_type = other DNA
tctggtctgctacaatgatc

SEQ ID NO: 2847 - DNA, 20 bp, synthetic construct
  source 1..20: mol_type = other DNA
ctgaagacttactaatttgg

SEQ ID NO: 2848 - DNA, 20 bp, synthetic construct
  source 1..20: mol_type = other DNA
tgaagacttactaatttggc

SEQ ID NO: 2849 - DNA, 20 bp, synthetic construct
  source 1..20: mol_type = other DNA
ccctgagaatcttaaattgt

SEQ ID NO: 2850 - DNA, 20 bp, synthetic construct
  source 1..20: mol_type = other DNA
cctgagaatcttaaattgtg

SEQ ID NO: 2851 - DNA, 20 bp, synthetic construct
  source 1..20: mol_type = other DNA
gagaatcttaaattgtgtgc

SEQ ID NO: 2852 - DNA, 20 bp, synthetic construct
  source 1..20: mol_type = other DNA
agaatcttaaattgtgtgcc

SEQ ID NO: 2853 - DNA, 20 bp, synthetic construct
  source 1..20: mol_type = other DNA
gaatcttaaattgtgtgcct

SEQ ID NO: 2854 - DNA, 20 bp, synthetic construct
  source 1..20: mol_type = other DNA
cctccagaattgccaaatga

SEQ ID NO: 2855 - DNA, 20 bp, synthetic construct
  source 1..20: mol_type = other DNA
tccagaattgccaaatgagt

SEQ ID NO: 2856 - DNA, 20 bp, synthetic construct
  source 1..20: mol_type = other DNA
ccagaattgccaaatgagtc

SEQ ID NO: 2857 - DNA, 20 bp, synthetic construct
  source 1..20: mol_type = other DNA
cagaattgccaaatgagtct

SEQ ID NO: 2858 - DNA, 20 bp, synthetic construct
  source 1..20: mol_type = other DNA
agaattgccaaatgagtctg

SEQ ID NO: 2859 - DNA, 20 bp, synthetic construct
  source 1..20: mol_type = other DNA
caaatgagtctggttgttac

SEQ ID NO: 2860 - DNA, 20 bp, synthetic construct
  source 1..20: mol_type = other DNA
aaatgagtctggttgttact

SEQ ID NO: 2861 - DNA, 20 bp, synthetic construct
  source 1..20: mol_type = other DNA
aaattgcaagtagacccaga

SEQ ID NO: 2862 - DNA, 20 bp, synthetic construct
  source 1..20: mol_type = other DNA
aattgcaagtagacccagaa

SEQ ID NO: 2863 - DNA, 20 bp, synthetic construct
  source 1..20: mol_type = other DNA
attgcaagtagacccagaat

SEQ ID NO: 2864 - DNA, 20 bp, synthetic construct
  source 1..20: mol_type = other DNA
ttgcaagtagacccagaatt

SEQ ID NO: 2865 - DNA, 20 bp, synthetic construct
  source 1..20: mol_type = other DNA
tgcaagtagacccagaatta

SEQ ID NO: 2866 - DNA, 20 bp, synthetic construct
  source 1..20: mol_type = other DNA
gaaataggaactgtttagcc

SEQ ID NO: 2867 - DNA, 20 bp, synthetic construct
  source 1..20: mol_type = other DNA
gcatcgagggcatgatagat

SEQ ID NO: 2868 - DNA, 20 bp, synthetic construct
  source 1..20: mol_type = other DNA
catcgagggcatgatagatc

SEQ ID NO: 2869 - DNA, 20 bp, synthetic construct
  source 1..20: mol_type = other DNA
ctggcttagatggtaacaaa

SEQ ID NO: 2870 - DNA, 20 bp, synthetic construct
  source 1..20: mol_type = other DNA
tggcttagatggtaacaaag

SEQ ID NO: 2871 - DNA, 20 bp, synthetic construct
  source 1..20: mol_type = other DNA
ggcttagatggtaacaaagt

SEQ ID NO: 2872 - DNA, 20 bp, synthetic construct
  source 1..20: mol_type = other DNA
gcttagatggtaacaaagtg

SEQ ID NO: 2873 - DNA, 20 bp, synthetic construct
  source 1..20: mol_type = other DNA
cttagatggtaacaaagtga

SEQ ID NO: 2874 - DNA, 20 bp, synthetic construct
  source 1..20: mol_type = other DNA
cacactggatgaaactgctg

SEQ ID NO: 2875 - DNA, 20 bp, synthetic construct
  source 1..20: mol_type = other DNA
acactggatgaaactgctga

SEQ ID NO: 2876 - DNA, 20 bp, synthetic construct
  source 1..20: mol_type = other DNA
cactggatgaaactgctgaa

SEQ ID NO: 2877 - DNA, 20 bp, synthetic construct
  source 1..20: mol_type = other DNA
actggatgaaactgctgaag

SEQ ID NO: 2878 - DNA, 20 bp, synthetic construct
  source 1..20: mol_type = other DNA
ctggatgaaactgctgaagg

SEQ ID NO: 2879 - DNA, 20 bp, synthetic construct
  source 1..20: mol_type = other DNA
caggctgtggtgctaaaggc

SEQ ID NO: 2880 - DNA, 20 bp, synthetic construct
  source 1..20: mol_type = other DNA
aggctgtggtgctaaaggca

SEQ ID NO: 2881 - DNA, 20 bp, synthetic construct
  source 1..20: mol_type = other DNA
ggctgtggtgctaaaggcat

SEQ ID NO: 2882 - DNA, 20 bp, synthetic construct
  source 1..20: mol_type = other DNA
tgcaatccacagtaagaaat

SEQ ID NO: 2883 - DNA, 20 bp, synthetic construct
  source 1..20: mol_type = other DNA
gcaatccacagtaagaaata

SEQ ID NO: 2884 - DNA, 20 bp, synthetic construct
  source 1..20: mol_type = other DNA
cagctcattacctcctacag

SEQ ID NO: 2885 - DNA, 20 bp, synthetic construct
  source 1..20: mol_type = other DNA
agctcattacctcctacagt

SEQ ID NO: 2886 - DNA, 20 bp, synthetic construct
  source 1..20: mol_type = other DNA
gctcattacctcctacagtg

SEQ ID NO: 2887 - DNA, 20 bp, synthetic construct
  source 1..20: mol_type = other DNA
atctgatggctggtcctggc

SEQ ID NO: 2888 - DNA, 20 bp, synthetic construct
  source 1..20: mol_type = other DNA
tctgatggctggtcctggca

SEQ ID NO: 2889 - DNA, 20 bp, synthetic construct
  source 1..20: mol_type = other DNA
aggctgggtctaagataggc

SEQ ID NO: 2890 - DNA, 20 bp, synthetic construct
  source 1..20: mol_type = other DNA
ggctgggtctaagataggcg

SEQ ID NO: 2891 - DNA, 20 bp, synthetic construct
  source 1..20: mol_type = other DNA
cataaggaagtcttaagttg

SEQ ID NO: 2892 - DNA, 20 bp, synthetic construct
  source 1..20: mol_type = other DNA
ataaggaagtcttaagttgg

SEQ ID NO: 2893 - DNA, 20 bp, synthetic construct
  source 1..20: mol_type = other DNA
taaggaagtcttaagttggt

SEQ ID NO: 2894 - DNA, 20 bp, synthetic construct
  source 1..20: mol_type = other DNA
aaggaagtcttaagttggtt

SEQ ID NO: 2895 - DNA, 20 bp, synthetic construct
  source 1..20: mol_type = other DNA
aggaagtcttaagttggttt

SEQ ID NO: 2896 - DNA, 20 bp, synthetic construct
  source 1..20: mol_type = other DNA
tggctatttagtggaatttg

SEQ ID NO: 2897 - DNA, 20 bp, synthetic construct
  source 1..20: mol_type = other DNA
ggctatttagtggaatttgg

SEQ ID NO: 2898 - DNA, 20 bp, synthetic construct
  source 1..20: mol_type = other DNA
gctatttagtggaatttggt

SEQ ID NO: 2899 - DNA, 20 bp, synthetic construct
  source 1..20: mol_type = other DNA
ctatttagtggaatttggtg

SEQ ID NO: 2900 - DNA, 20 bp, synthetic construct
  source 1..20: mol_type = other DNA
ttagtggaatttggtgattc

SEQ ID NO: 2901 - DNA, 20 bp, synthetic construct
  source 1..20: mol_type = other DNA
tagtggaatttggtgattca

SEQ ID NO: 2902 - DNA, 20 bp, synthetic construct
  source 1..20: mol_type = other DNA
agtggaatttggtgattcag

SEQ ID NO: 2903 - DNA, 20 bp, synthetic construct
  source 1..20: mol_type = other DNA
gtggaatttggtgattcaga

SEQ ID NO: 2904 - DNA, 20 bp, synthetic construct
  source 1..20: mol_type = other DNA
tggaatttggtgattcagaa

SEQ ID NO: 2905 - DNA, 20 bp, synthetic construct
  source 1..20: mol_type = other DNA
ggaatttggtgattcagaac

SEQ ID NO: 2906 - DNA, 20 bp, synthetic construct
  source 1..20: mol_type = other DNA
gaatttggtgattcagaact

SEQ ID NO: 2907 - DNA, 20 bp, synthetic construct
  source 1..20: mol_type = other DNA
gagacagggaccaaatattt

SEQ ID NO: 2908 - DNA, 20 bp, synthetic construct
  source 1..20: mol_type = other DNA
aaactgatgggtgtctgttt

SEQ ID NO: 2909 - DNA, 20 bp, synthetic construct
  source 1..20: mol_type = other DNA
gcagcctccagaatcacaac

SEQ ID NO: 2910 - DNA, 20 bp, synthetic construct
  source 1..20: mol_type = other DNA
cagcctccagaatcacaaca

SEQ ID NO: 2911 - DNA, 20 bp, synthetic construct
  source 1..20: mol_type = other DNA
agcctccagaatcacaacag

SEQ ID NO: 2912 - DNA, 20 bp, synthetic construct
  source 1..20: mol_type = other DNA
gcctccagaatcacaacaga

SEQ ID NO: 2913 - DNA, 20 bp, synthetic construct
  source 1..20: mol_type = other DNA
cctccagaatcacaacagat

SEQ ID NO: 2914 - DNA, 20 bp, synthetic construct
  source 1..20: mol_type = other DNA
ctccagaatcacaacagatt

SEQ ID NO: 2915 - DNA, 20 bp, synthetic construct
  source 1..20: mol_type = other DNA
caacagattcagagagagtc

SEQ ID NO: 2916 - DNA, 20 bp, synthetic construct
  source 1..20: mol_type = other DNA
gtggcttactttggtcaata

SEQ ID NO: 2917 - DNA, 20 bp, synthetic construct
  source 1..20: mol_type = other DNA
tggcttactttggtcaatag

SEQ ID NO: 2918 - DNA, 20 bp, synthetic construct
  source 1..20: mol_type = other DNA
ggcttactttggtcaataga

SEQ ID NO: 2919 - DNA, 20 bp, synthetic construct
  source 1..20: mol_type = other DNA
gcttactttggtcaatagaa

SEQ ID NO: 2920 - DNA, 16 bp, synthetic construct
  source 1..16: mol_type = other DNA
ctggctatacaatgac

SEQ ID NO: 2921 - DNA, 16 bp, synthetic construct
  source 1..16: mol_type = other DNA
ggctatacaatgacag

SEQ ID NO: 2922 - DNA, 16 bp, synthetic construct
  source 1..16: mol_type = other DNA
gtccagtaaagagacc

SEQ ID NO: 2923 - DNA, 20 bp, synthetic construct
  source 1..20: mol_type = other DNA
caacagcacctcttccttaa

SEQ ID NO: 2924 - DNA, 20 bp, synthetic construct
  source 1..20: mol_type = other DNA
aacagcacctcttccttaaa

SEQ ID NO: 2925 - DNA, 20 bp, synthetic construct
  source 1..20: mol_type = other DNA
ataatagagcagaatcacca

SEQ ID NO: 2926 - DNA, 20 bp, synthetic construct
  source 1..20: mol_type = other DNA
gcagaatcaccacctcacat

SEQ ID NO: 2927 - DNA, 20 bp, synthetic construct
  source 1..20: mol_type = other DNA
cagaatcaccacctcacatt

SEQ ID NO: 2928 - DNA, 20 bp, synthetic construct
  source 1..20: mol_type = other DNA
agaatcaccacctcacattc

SEQ ID NO: 2929 - DNA, 20 bp, synthetic construct
  source 1..20: mol_type = other DNA
gaatcaccacctcacattct

SEQ ID NO: 2930 - DNA, 20 bp, synthetic construct
  source 1..20: mol_type = other DNA
aatcaccacctcacattcta

SEQ ID NO: 2931 - DNA, 20 bp, synthetic construct
  source 1..20: mol_type = other DNA
agcagcagacaagtaagttc

SEQ ID NO: 2932 - DNA, 20 bp, synthetic construct
  source 1..20: mol_type = other DNA
gcagcagacaagtaagttca

SEQ ID NO: 2933 - DNA, 20 bp, synthetic construct
  source 1..20: mol_type = other DNA
cagcagacaagtaagttcag

SEQ ID NO: 2934 - DNA, 20 bp, synthetic construct
  source 1..20: mol_type = other DNA
ctggagaagccaataaagtt

SEQ ID NO: 2935 - DNA, 20 bp, synthetic construct
  source 1..20: mol_type = other DNA
tggagaagccaataaagttt

SEQ ID NO: 2936 - DNA, 16 bp, synthetic construct
  source 1..16: mol_type = other DNA
gccgtagagagcaacc

SEQ ID NO: 2937 - DNA, 16 bp, synthetic construct
  source 1..16: mol_type = other DNA
ccgtagagagcaacca

SEQ ID NO: 2938 - DNA, 16 bp, synthetic construct
  source 1..16: mol_type = other DNA
tcggtcagatggaaac

SEQ ID NO: 2939 - DNA, 16 bp, synthetic construct
  source 1..16: mol_type = other DNA
gtagtgcggtgttaag

SEQ ID NO: 2940 - DNA, 16 bp, synthetic construct
  source 1..16: mol_type = other DNA
tagtgcggtgttaagg

SEQ ID NO: 2941 - DNA, 16 bp, synthetic construct
  source 1..16: mol_type = other DNA
gccacaagagaccacg

SEQ ID NO: 2942 - DNA, 16 bp, synthetic construct
  source 1..16: mol_type = other DNA
ccacaagagaccacga

SEQ ID NO: 2943 - DNA, 16 bp, synthetic construct
  source 1..16: mol_type = other DNA
acgttccatgtagttc

SEQ ID NO: 2944 - DNA, 16 bp, synthetic construct
  source 1..16: mol_type = other DNA
catgtagttccgtgga

SEQ ID NO: 2945 - DNA, 16 bp, synthetic construct
  source 1..16: mol_type = other DNA
atgtagttccgtggat

SEQ ID NO: 2946 - DNA, 16 bp, synthetic construct
  source 1..16: mol_type = other DNA
tgtagttccgtggatg

SEQ ID NO: 2947 - DNA, 16 bp, synthetic construct
  source 1..16: mol_type = other DNA
gtagttccgtggatgc

SEQ ID NO: 2948 - DNA, 16 bp, synthetic construct
  source 1..16: mol_type = other DNA
tagttccgtggatgcc

SEQ ID NO: 2949 - DNA, 16 bp, synthetic construct
  source 1..16: mol_type = other DNA
agttccgtggatgccc

SEQ ID NO: 2950 - DNA, 16 bp, synthetic construct
  source 1..16: mol_type = other DNA
ggttccaccagacgat

SEQ ID NO: 2951 - DNA, 16 bp, synthetic construct
  source 1..16: mol_type = other DNA
accagacgatgccaga

SEQ ID NO: 2952 - DNA, 16 bp, synthetic construct
  source 1..16: mol_type = other DNA
ccagacgatgccagaa

SEQ ID NO: 2953 - DNA, 16 bp, synthetic construct
  source 1..16: mol_type = other DNA
cagacgatgccagaat

SEQ ID NO: 2954 - DNA, 16 bp, synthetic construct
  source 1..16: mol_type = other DNA
gacgatgccagaatat

SEQ ID NO: 2955 - DNA, 16 bp, synthetic construct
  source 1..16: mol_type = other DNA
acgatgccagaatatc

SEQ ID NO: 2956 - DNA, 16 bp, synthetic construct
  source 1..16: mol_type = other DNA
cgatgccagaatatct

SEQ ID NO: 2957 - DNA, 16 bp, synthetic construct
  source 1..16: mol_type = other DNA
gcgtctctgctgattg

SEQ ID NO: 2958 - DNA, 16 bp, synthetic construct
  source 1..16: mol_type = other DNA
tttgacagttagcgtg

SEQ ID NO: 2959 - DNA, 16 bp, synthetic construct
  source 1..16: mol_type = other DNA
ttgacagttagcgtgc

SEQ ID NO: 2960 - DNA, 16 bp, synthetic construct
  source 1..16: mol_type = other DNA
cgtgccatgctttgga

SEQ ID NO: 2961 - DNA, 16 bp, synthetic construct
  source 1..16: mol_type = other DNA
aggaagtgatcttacg

SEQ ID NO: 2962 - DNA, 16 bp, synthetic construct
  source 1..16: mol_type = other DNA
ggaagtgatcttacga

SEQ ID NO: 2963 - DNA, 16 bp, synthetic construct
  source 1..16: mol_type = other DNA
gaagtgatcttacgac

SEQ ID NO: 2964 - DNA, 16 bp, synthetic construct
  source 1..16: mol_type = other DNA
actgtcgtgtagttgt

SEQ ID NO: 2965 - DNA, 16 bp, synthetic construct
  source 1..16: mol_type = other DNA
tgtcgtgtagttgtgc

SEQ ID NO: 2966 - DNA, 16 bp, synthetic construct
  source 1..16: mol_type = other DNA
gtcgtgtagttgtgct

SEQ ID NO: 2967 - DNA, 16 bp, synthetic construct
  source 1..16: mol_type = other DNA
tcgtgtagttgtgcta

SEQ ID NO: 2968 - DNA, 16 bp, synthetic construct
  source 1..16: mol_type = other DNA
tttcaaagagggaccg

SEQ ID NO: 2969 - DNA, 16 bp, synthetic construct
  source 1..16: mol_type = other DNA
ttcaaagagggaccgt

SEQ ID NO: 2970 - DNA, 16 bp, synthetic construct
  source 1..16: mol_type = other DNA
tcaaagagggaccgtt

SEQ ID NO: 2971 - DNA, 16 bp, synthetic construct
  source 1..16: mol_type = other DNA
cactctctctaacgaa

SEQ ID NO: 2972 - DNA, 16 bp, synthetic construct
  source 1..16: mol_type = other DNA
actctctctaacgaag

SEQ ID NO: 2973 - DNA, 16 bp, synthetic construct
  source 1..16: mol_type = other DNA
tctctctaacgaagcc

SEQ ID NO: 2974 - DNA, 16 bp, synthetic construct
  source 1..16: mol_type = other DNA
ctctctaacgaagcca

SEQ ID NO: 2975 - DNA, 16 bp, synthetic construct
  source 1..16: mol_type = other DNA
tccgattgttgattgc

SEQ ID NO: 2976 - DNA, 16 bp, synthetic construct
  source 1..16: mol_type = other DNA
gattgttgattgcggt

SEQ ID NO: 2977 - DNA, 16 bp, synthetic construct
  source 1..16: mol_type = other DNA
attgttgattgcggtg

SEQ ID NO: 2978 - DNA, 16 bp, synthetic construct
  source 1..16: mol_type = other DNA
ttgttgattgcggtgt

SEQ ID NO: 2979 - DNA, 16 bp, synthetic construct
  source 1..16: mol_type = other DNA
tgttgattgcggtgtc

SEQ ID NO: 2980 - DNA, 16 bp, synthetic construct
  source 1..16: mol_type = other DNA
gttgattgcggtgtcc

SEQ ID NO: 2981 - DNA, 16 bp, synthetic construct
  source 1..16: mol_type = other DNA
ttgattgcggtgtcct

SEQ ID NO: 2982 - DNA, 16 bp, synthetic construct
  source 1..16: mol_type = other DNA
tgattgcggtgtccta

SEQ ID NO: 2983 - DNA, 16 bp, synthetic construct
  source 1..16: mol_type = other DNA
gattgcggtgtcctaa

SEQ ID NO: 2984 - DNA, 16 bp, synthetic construct
  source 1..16: mol_type = other DNA
attgcggtgtcctaaa

SEQ ID NO: 2985 - DNA, 16 bp, synthetic construct
  source 1..16: mol_type = other DNA
ttgcggtgtcctaaat

SEQ ID NO: 2986 - DNA, 16 bp, synthetic construct
  source 1..16: mol_type = other DNA
tgcggtgtcctaaata

SEQ ID NO: 2987 - DNA, 16 bp, synthetic construct
  source 1..16: mol_type = other DNA
gcggtgtcctaaatac

SEQ ID NO: 2988 - DNA, 16 bp, synthetic construct
  source 1..16: mol_type = other DNA
cggtgtcctaaatact

SEQ ID NO: 2989 - DNA, 16 bp, synthetic construct
  source 1..16: mol_type = other DNA
acgtgtctgatcccaa

SEQ ID NO: 2990 - DNA, 16 bp, synthetic construct
  source 1..16: mol_type = other DNA
cgtgtctgatcccaaa

SEQ ID NO: 2991 - DNA, 16 bp, synthetic construct
  source 1..16: mol_type = other DNA
ctatagcgggatatgg

SEQ ID NO: 2992 - DNA, 16 bp, synthetic construct
  source 1..16: mol_type = other DNA
tagcacactgaaagcg

SEQ ID NO: 2993 - DNA, 16 bp, synthetic construct
  source 1..16: mol_type = other DNA
actgaaagcgtcaata

SEQ ID NO: 2994 - DNA, 16 bp, synthetic construct
  source 1..16: mol_type = other DNA
cgatccttggcatgac

SEQ ID NO: 2995 - DNA, 16 bp, synthetic construct
  source 1..16: mol_type = other DNA
tgtaagtcttatcacg

SEQ ID NO: 2996 - DNA, 16 bp, synthetic construct
  source 1..16: mol_type = other DNA
gtaagtcttatcacgt

SEQ ID NO: 2997 - DNA, 16 bp, synthetic construct
  source 1..16: mol_type = other DNA
taagtcttatcacgtc

SEQ ID NO: 2998 - DNA, 16 bp, synthetic construct
  source 1..16: mol_type = other DNA
aagtcttatcacgtcc

SEQ ID NO: 2999 - DNA, 16 bp, synthetic construct
  source 1..16: mol_type = other DNA
gacattacgagagatt

SEQ ID NO: 3000 - DNA, 16 bp, synthetic construct
  source 1..16: mol_type = other DNA
ctgaacagacacacgc

SEQ ID NO: 3001 - DNA, 16 bp, synthetic construct
  source 1..16: mol_type = other DNA
aactctagtcggtttc

SEQ ID NO: 3002 - DNA, 16 bp, synthetic construct
  source 1..16: mol_type = other DNA
tattcaagtttacggg

SEQ ID NO: 3003 - DNA, 16 bp, synthetic construct
  source 1..16: mol_type = other DNA
attcaagtttacgggc

SEQ ID NO: 3004 - DNA, 16 bp, synthetic construct
  source 1..16: mol_type = other DNA
ttcaagtttacgggct

SEQ ID NO: 3005 - DNA, 16 bp, synthetic construct
  source 1..16: mol_type = other DNA
tcaagtttacgggcta

SEQ ID NO: 3006 - DNA, 16 bp, synthetic construct
  source 1..16: mol_type = other DNA
caagtttacgggctag

SEQ ID NO: 3007 - DNA, 16 bp, synthetic construct
  source 1..16: mol_type = other DNA
aagtttacgggctagg

SEQ ID NO: 3008 - DNA, 16 bp, synthetic construct
  source 1..16: mol_type = other DNA
gtaaacaaaggctcgc

SEQ ID NO: 3009 - DNA, 16 bp, synthetic construct
  source 1..16: mol_type = other DNA
taaacaaaggctcgct

SEQ ID NO: 3010 - DNA, 16 bp, synthetic construct
  source 1..16: mol_type = other DNA
aacaaaggctcgcttc

SEQ ID NO: 3011 - DNA, 16 bp, synthetic construct
  source 1..16: mol_type = other DNA
acaaaggctcgcttca

SEQ ID NO: 3012 - DNA, 16 bp, synthetic construct
  source 1..16: mol_type = other DNA
caaaggctcgcttcat

SEQ ID NO: 3013 - DNA, 16 bp, synthetic construct
  source 1..16: mol_type = other DNA
aaaggctcgcttcatg

SEQ ID NO: 3014 - DNA, 16 bp, synthetic construct
  source 1..16: mol_type = other DNA
agtttacgggctaggc

SEQ ID NO: 3015 - DNA, 16 bp, synthetic construct
  source 1..16: mol_type = other DNA
tcggctcaatctgtac

SEQ ID NO: 3016 - DNA, 16 bp, synthetic construct
  source 1..16: mol_type = other DNA
ccggtctggatgtctg

SEQ ID NO: 3017 - DNA, 16 bp, synthetic construct
  source 1..16: mol_type = other DNA
ccgctcaggcaaggtt

SEQ ID NO: 3018 - DNA, 16 bp, synthetic construct
  source 1..16: mol_type = other DNA
cgctcaggcaaggtta

SEQ ID NO: 3019 - DNA, 16 bp, synthetic construct
  source 1..16: mol_type = other DNA
ccacacgagaactaag

SEQ ID NO: 3020 - DNA, 16 bp, synthetic construct
  source 1..16: mol_type = other DNA
cacacgagaactaagc

SEQ ID NO: 3021 - DNA, 16 bp, synthetic construct
  source 1..16: mol_type = other DNA
gagaacttcacacgat

SEQ ID NO: 3022 - DNA, 16 bp, synthetic construct
  source 1..16: mol_type = other DNA
agaacttcacacgatg

SEQ ID NO: 3023 - DNA, 16 bp, synthetic construct
  source 1..16: mol_type = other DNA
gttgtcacattaaccg

SEQ ID NO: 3024 - DNA, 16 bp, synthetic construct
  source 1..16: mol_type = other DNA
ttgtcacattaaccgt

SEQ ID NO: 3025 - DNA, 16 bp, synthetic construct
  source 1..16: mol_type = other DNA
tgtcacattaaccgtc

SEQ ID NO: 3026 - DNA, 16 bp, synthetic construct
  source 1..16: mol_type = other DNA
aactactgtgtgtacg

SEQ ID NO: 3027 - DNA, 16 bp, synthetic construct
  source 1..16: mol_type = other DNA
actactgtgtgtacgg

SEQ ID NO: 3028 - DNA, 16 bp, synthetic construct
  source 1..16: mol_type = other DNA
ctactgtgtgtacggt

SEQ ID NO: 3029 - DNA, 16 bp, synthetic construct
  source 1..16: mol_type = other DNA
aactcagacgtggctt

SEQ ID NO: 3030 - DNA, 16 bp, synthetic construct
  source 1..16: mol_type = other DNA
actcagacgtggcttc

SEQ ID NO: 3031 - DNA, 16 bp, synthetic construct
  source 1..16: mol_type = other DNA
agacgtggcttcagac

SEQ ID NO: 3032 - DNA, 16 bp, synthetic construct
  source 1..16: mol_type = other DNA
gacgtggcttcagact

SEQ ID NO: 3033 - DNA, 16 bp, synthetic construct
  source 1..16: mol_type = other DNA
tactgtgtgtacggtg

SEQ ID NO: 3034 - DNA, 16 bp, synthetic construct
  source 1..16: mol_type = other DNA
gtgtacggtggtggac

SEQ ID NO: 3035 - DNA, 16 bp, synthetic construct
  source 1..16: mol_type = other DNA
tgtacggtggtggaca

SEQ ID NO: 3036 - DNA, 16 bp, synthetic construct
  source 1..16: mol_type = other DNA
gtacggtggtggacat

SEQ ID NO: 3037 - DNA, 16 bp, synthetic construct
  source 1..16: mol_type = other DNA
tacggtggtggacatt

SEQ ID NO: 3038 - DNA, 16 bp, synthetic construct
  source 1..16: mol_type = other DNA
acggtggtggacatta

SEQ ID NO: 3039 - DNA, 16 bp, synthetic construct
  source 1..16: mol_type = other DNA
cgggtactattggcaa

SEQ ID NO: 3040 - DNA, 16 bp, synthetic construct
  source 1..16: mol_type = other DNA
gcaatattcctcgtgc

SEQ ID NO: 3041 - DNA, 16 bp, synthetic construct
  source 1..16: mol_type = other DNA
gcgccacataagatga

SEQ ID NO: 3042 - DNA, 16 bp, synthetic construct
  source 1..16: mol_type = other DNA
cgccacataagatgaa

SEQ ID NO: 3043 - DNA, 16 bp, synthetic construct
  source 1..16: mol_type = other DNA
taaattccgtttgagc

SEQ ID NO: 3044 - DNA, 16 bp, synthetic construct
  source 1..16: mol_type = other DNA
aattccgtttgagcac

SEQ ID NO: 3045 - DNA, 16 bp, synthetic construct
  source 1..16: mol_type = other DNA
attccgtttgagcacc

SEQ ID NO: 3046 - DNA, 16 bp, synthetic construct
  source 1..16: mol_type = other DNA
ccgtttgagcaccttg

SEQ ID NO: 3047 - DNA, 16 bp, synthetic construct
  source 1..16: mol_type = other DNA
cgtttgagcaccttgt

SEQ ID NO: 3048 - DNA, 16 bp, synthetic construct
  source 1..16: mol_type = other DNA
gaattgaggcttaacg

SEQ ID NO: 3049 - DNA, 16 bp, synthetic construct
  source 1..16: mol_type = other DNA
aattgaggcttaacgt

SEQ ID NO: 3050 - DNA, 16 bp, synthetic construct
  source 1..16: mol_type = other DNA
attgaggcttaacgtt

SEQ ID NO: 3051 - DNA, 16 bp, synthetic construct
  source 1..16: mol_type = other DNA
tgaggcttaacgtttg

SEQ ID NO: 3052 - DNA, 16 bp, synthetic construct
  source 1..16: mol_type = other DNA
gcttaacgtttgcata

SEQ ID NO: 3053 - DNA, 16 bp, synthetic construct
  source 1..16: mol_type = other DNA
cctaaatccgatgatt

SEQ ID NO: 3054 - DNA, 16 bp, synthetic construct
  source 1..16: mol_type = other DNA
ctaaatccgatgattg

SEQ ID NO: 3055 - DNA, 16 bp, synthetic construct
  source 1..16: mol_type = other DNA
taaatccgatgattgg

SEQ ID NO: 3056 - DNA, 16 bp, synthetic construct
  source 1..16: mol_type = other DNA
aaatccgatgattggt

SEQ ID NO: 3057 - DNA, 16 bp, synthetic construct
  source 1..16: mol_type = other DNA
aatccgatgattggtc

SEQ ID NO: 3058 - DNA, 16 bp, synthetic construct
  source 1..16: mol_type = other DNA
cgatgattggtctcct

SEQ ID NO: 3059 - DNA, 16 bp, synthetic construct
  source 1..16: mol_type = other DNA
agaacctattccgtat

SEQ ID NO: 3060 - DNA, 16 bp, synthetic construct
  source 1..16: mol_type = other DNA
aacctattccgtatgg

SEQ ID NO: 3061 - DNA, 16 bp, synthetic construct
  source 1..16: mol_type = other DNA
ggtcttcccacacgaa

SEQ ID NO: 3062 - DNA, 16 bp, synthetic construct
  source 1..16: mol_type = other DNA
cttcccacacgaaatg

SEQ ID NO: 3063 - DNA, 16 bp, synthetic construct
  source 1..16: mol_type = other DNA
cacacgaaatggctgt

SEQ ID NO: 3064 - DNA, 16 bp, synthetic construct
  source 1..16: mol_type = other DNA
ccatttcagcggatta

SEQ ID NO: 3065 - DNA, 16 bp, synthetic construct
  source 1..16: mol_type = other DNA
catttcagcggattat

SEQ ID NO: 3066 - DNA, 16 bp, synthetic construct
  source 1..16: mol_type = other DNA
ttcagcggattatatc

SEQ ID NO: 3067 - DNA, 16 bp, synthetic construct
  source 1..16: mol_type = other DNA
acacgaaatggctgtc

SEQ ID NO: 3068 - DNA, 16 bp, synthetic construct
  source 1..16: mol_type = other DNA
ctgtcttgtaagaacg

SEQ ID NO: 3069 - DNA, 16 bp, synthetic construct
  source 1..16: mol_type = other DNA
tgtcttgtaagaacgg

SEQ ID NO: 3070 - DNA, 16 bp, synthetic construct
  source 1..16: mol_type = other DNA
gtcttgtaagaacggg

SEQ ID NO: 3071 - DNA, 16 bp, synthetic construct
  source 1..16: mol_type = other DNA
tcttgtaagaacgggc

SEQ ID NO: 3072 - DNA, 16 bp, synthetic construct
  source 1..16: mol_type = other DNA
cttgtaagaacgggct

SEQ ID NO: 3073 - DNA, 16 bp, synthetic construct
  source 1..16: mol_type = other DNA
ttgtaagaacgggcta

SEQ ID NO: 3074 - DNA, 16 bp, synthetic construct
  source 1..16: mol_type = other DNA
agaacgggctagactt

SEQ ID NO: 3075 - DNA, 16 bp, synthetic construct
  source 1..16: mol_type = other DNA
gaacgggctagactta

SEQ ID NO: 3076 - DNA, 16 bp, synthetic construct
  source 1..16: mol_type = other DNA
aacgggctagacttag

SEQ ID NO: 3077 - DNA, 16 bp, synthetic construct
  source 1..16: mol_type = other DNA
acgggctagacttagt

SEQ ID NO: 3078 - DNA, 16 bp, synthetic construct
  source 1..16: mol_type = other DNA
cgggctagacttagtg

SEQ ID NO: 3079 - DNA, 16 bp, synthetic construct
  source 1..16: mol_type = other DNA
cacgaaatggctgtct

SEQ ID NO: 3080 - DNA, 16 bp, synthetic construct
  source 1..16: mol_type = other DNA
cgaaatggctgtcttg

SEQ ID NO: 3081 - DNA, 16 bp, synthetic construct
  source 1..16: mol_type = other DNA
tgtccttaccgaaatg

SEQ ID NO: 3082 - DNA, 16 bp, synthetic construct
  source 1..16: mol_type = other DNA
gtccttaccgaaatgt

SEQ ID NO: 3083 - DNA, 16 bp, synthetic construct
  source 1..16: mol_type = other DNA
tccttaccgaaatgtc

SEQ ID NO: 3084 - DNA, 16 bp, synthetic construct
  source 1..16: mol_type = other DNA
ccttaccgaaatgtca

SEQ ID NO: 3085 - DNA, 16 bp, synthetic construct
  source 1..16: mol_type = other DNA
gtcgtataatttgctg

SEQ ID NO: 3086 - DNA, 16 bp, synthetic construct
  source 1..16: mol_type = other DNA
tcgtataatttgctgc

SEQ ID NO: 3087 - DNA, 16 bp, synthetic construct
  source 1..16: mol_type = other DNA
cgtataatttgctgct

SEQ ID NO: 3088 - DNA, 16 bp, synthetic construct
  source 1..16: mol_type = other DNA
gtagatatggatgtcg

SEQ ID NO: 3089 - DNA, 16 bp, synthetic construct
  source 1..16: mol_type = other DNA
tagatatggatgtcgt

SEQ ID NO: 3090 - DNA, 16 bp, synthetic construct
  source 1..16: mol_type = other DNA
agatatggatgtcgtc

SEQ ID NO: 3091 - DNA, 16 bp, synthetic construct
  source 1..16: mol_type = other DNA
gatatggatgtcgtca

SEQ ID NO: 3092 - DNA, 16 bp, synthetic construct
  source 1..16: mol_type = other DNA
atatggatgtcgtcac

SEQ ID NO: 3093 - DNA, 16 bp, synthetic construct
  source 1..16: mol_type = other DNA
tatggatgtcgtcaca

SEQ ID NO: 3094 - DNA, 16 bp, synthetic construct
  source 1..16: mol_type = other DNA
atggatgtcgtcacat

SEQ ID NO: 3095 - DNA, 16 bp, synthetic construct
  source 1..16: mol_type = other DNA
tctaggtcacattcgt

SEQ ID NO: 3096 - DNA, 16 bp, synthetic construct
  source 1..16: mol_type = other DNA
ctaggtcacattcgtt

SEQ ID NO: 3097 - DNA, 16 bp, synthetic construct
  source 1..16: mol_type = other DNA
taggtcacattcgttg

SEQ ID NO: 3098 - DNA, 16 bp, synthetic construct
  source 1..16: mol_type = other DNA
aggtcacattcgttga

SEQ ID NO: 3099 - DNA, 16 bp, synthetic construct
  source 1..16: mol_type = other DNA
ggtcacattcgttgat

SEQ ID NO: 3100 - DNA, 16 bp, synthetic construct
  source 1..16: mol_type = other DNA
tcatcgaagaggttgc

SEQ ID NO: 3101 - DNA, 16 bp, synthetic construct
  source 1..16: mol_type = other DNA
catcgaagaggttgca

SEQ ID NO: 3102 - DNA, 16 bp, synthetic construct
  source 1..16: mol_type = other DNA
agctccgtcatgtgat

SEQ ID NO: 3103 - DNA, 16 bp, synthetic construct
  source 1..16: mol_type = other DNA
gctccgtcatgtgatg

SEQ ID NO: 3104 - DNA, 16 bp, synthetic construct
  source 1..16: mol_type = other DNA
ctccgtcatgtgatga

SEQ ID NO: 3105 - DNA, 16 bp, synthetic construct
  source 1..16: mol_type = other DNA
tccgtcatgtgatgag

SEQ ID NO: 3106 - DNA, 16 bp, synthetic construct
  source 1..16: mol_type = other DNA
ccgtcatgtgatgagt

SEQ ID NO: 3107 - DNA, 16 bp, synthetic construct
  source 1..16: mol_type = other DNA
cgtcatgtgatgagtg

SEQ ID NO: 3108 - DNA, 16 bp, synthetic construct
  source 1..16: mol_type = other DNA
tttgcacgagttcatc

SEQ ID NO: 3109 - DNA, 16 bp, synthetic construct
  source 1..16: mol_type = other DNA
ttgcacgagttcatca

SEQ ID NO: 3110 - DNA, 16 bp, synthetic construct
  source 1..16: mol_type = other DNA
tgcacgagttcatcag

SEQ ID NO: 3111 - DNA, 16 bp, synthetic construct
  source 1..16: mol_type = other DNA
gcacgagttcatcagg

SEQ ID NO: 3112 - DNA, 16 bp, synthetic construct
  source 1..16: mol_type = other DNA
cacgagttcatcaggt

SEQ ID NO: 3113 - DNA, 16 bp, synthetic construct
  source 1..16: mol_type = other DNA
acgagttcatcaggtc

SEQ ID NO: 3114 - DNA, 16 bp, synthetic construct
  source 1..16: mol_type = other DNA
cgagttcatcaggtca

SEQ ID NO: 3115 - DNA, 16 bp, synthetic construct
  source 1..16: mol_type = other DNA
aaagtttgcgaatggc

SEQ ID NO: 3116 - DNA, 16 bp, synthetic construct
  source 1..16: mol_type = other DNA
aagtttgcgaatggct

SEQ ID NO: 3117 - DNA, 16 bp, synthetic construct
  source 1..16: mol_type = other DNA
agtttgcgaatggctg

SEQ ID NO: 3118 - DNA, 16 bp, synthetic construct
  source 1..16: mol_type = other DNA
gtttgcgaatggctga

SEQ ID NO: 3119 - DNA, 16 bp, synthetic construct
  source 1..16: mol_type = other DNA
tttgcgaatggctgag

SEQ ID NO: 3120 - DNA, 16 bp, synthetic construct
  source 1..16: mol_type = other DNA
gcgctaattctgtgac

SEQ ID NO: 3121 - DNA, 16 bp, synthetic construct
  source 1..16: mol_type = other DNA
cgctaattctgtgact

SEQ ID NO: 3122 - DNA, 16 bp, synthetic construct
  source 1..16: mol_type = other DNA
cggtccatatttgaat

SEQ ID NO: 3123 - DNA, 16 bp, synthetic construct
  source 1..16: mol_type = other DNA
tttccgccaagtgtgg

SEQ ID NO: 3124 - DNA, 16 bp, synthetic construct
  source 1..16: mol_type = other DNA
tgtgatttgtcatacg

SEQ ID NO: 3125 - DNA, 16 bp, synthetic construct
  source 1..16: mol_type = other DNA
gtgatttgtcatacgt

SEQ ID NO: 3126 - DNA, 16 bp, synthetic construct
  source 1..16: mol_type = other DNA
tgatttgtcatacgtg

SEQ ID NO: 3127 - DNA, 16 bp, synthetic construct
  source 1..16: mol_type = other DNA
cacgtaagtaccaaat

SEQ ID NO: 3128 - DNA, 16 bp, synthetic construct
  source 1..16: mol_type = other DNA
ttgtcatacgtggatg

SEQ ID NO: 3129 - DNA, 16 bp, synthetic construct
  source 1..16: mol_type = other DNA
gtcatacgtggatgga

SEQ ID NO: 3130 - DNA, 16 bp, synthetic construct
  source 1..16: mol_type = other DNA
tcatacgtggatggat

SEQ ID NO: 3131 - DNA, 16 bp, synthetic construct
  source 1..16: mol_type = other DNA
tacgtggatggatgtc

SEQ ID NO: 3132 - DNA, 16 bp, synthetic construct
  source 1..16: mol_type = other DNA
acgtggatggatgtca

SEQ ID NO: 3133 - DNA, 16 bp, synthetic construct
  source 1..16: mol_type = other DNA
ctccataacctcgaat

SEQ ID NO: 3134 - DNA, 16 bp, synthetic construct
  source 1..16: mol_type = other DNA
tccataacctcgaatt

SEQ ID NO: 3135 - DNA, 16 bp, synthetic construct
  source 1..16: mol_type = other DNA
ccaaacacctttcgca

SEQ ID NO: 3136 - DNA, 16 bp, synthetic construct
  source 1..16: mol_type = other DNA
caaacacctttcgcat

SEQ ID NO: 3137 - DNA, 16 bp, synthetic construct
  source 1..16: mol_type = other DNA
acacctttcgcattgg

SEQ ID NO: 3138 - DNA, 16 bp, synthetic construct
  source 1..16: mol_type = other DNA
acctttcgcattggaa

SEQ ID NO: 3139 - DNA, 16 bp, synthetic construct
  source 1..16: mol_type = other DNA
cctttcgcattggaac

SEQ ID NO: 3140 - DNA, 16 bp, synthetic construct
  source 1..16: mol_type = other DNA
ctttcgcattggaaca

SEQ ID NO: 3141 - DNA, 16 bp, synthetic construct
  source 1..16: mol_type = other DNA
tttcgcattggaacag

SEQ ID NO: 3142 - DNA, 16 bp, synthetic construct
  source 1..16: mol_type = other DNA
tcgcattggaacagga

SEQ ID NO: 3143 - DNA, 16 bp, synthetic construct
  source 1..16: mol_type = other DNA
ataacggaattgcatg

SEQ ID NO: 3144 - DNA, 16 bp, synthetic construct
  source 1..16: mol_type = other DNA
taacggaattgcatga

SEQ ID NO: 3145 - DNA, 16 bp, synthetic construct
  source 1..16: mol_type = other DNA
aacggaattgcatgat

SEQ ID NO: 3146 - DNA, 16 bp, synthetic construct
  source 1..16: mol_type = other DNA
acggaattgcatgatt

SEQ ID NO: 3147 - DNA, 16 bp, synthetic construct
  source 1..16: mol_type = other DNA
cggaattgcatgattt

SEQ ID NO: 3148 - DNA, 16 bp, synthetic construct
  source 1..16: mol_type = other DNA
ccgctgtgtctatgag

SEQ ID NO: 3149 - DNA, 16 bp, synthetic construct
  source 1..16: mol_type = other DNA
cgctgtgtctatgaga

SEQ ID NO: 3150 - DNA, 16 bp, synthetic construct
  source 1..16: mol_type = other DNA
gttcagagacacggtg

SEQ ID NO: 3151 - DNA, 16 bp, synthetic construct
  source 1..16: mol_type = other DNA
agacacggtgggatct

SEQ ID NO: 3152 - DNA, 16 bp, synthetic construct
  source 1..16: mol_type = other DNA
gacacggtgggatcta

SEQ ID NO: 3153 - DNA, 16 bp, synthetic construct
  source 1..16: mol_type = other DNA
acacggtgggatctat

SEQ ID NO: 3154 - DNA, 16 bp, synthetic construct
  source 1..16: mol_type = other DNA
cacggtgggatctatt

SEQ ID NO: 3155 - DNA, 16 bp, synthetic construct
  source 1..16: mol_type = other DNA
acggtgggatctattt

SEQ ID NO: 3156 - DNA, 16 bp, synthetic construct
  source 1..16: mol_type = other DNA
cggtgggatctatttg

SEQ ID NO: 3157 - DNA, 16 bp, synthetic construct
  source 1..16: mol_type = other DNA
acggcattggttgttt

SEQ ID NO: 3158 - DNA, 16 bp, synthetic construct
  source 1..16: mol_type = other DNA
ggacttaaacattcgt

SEQ ID NO: 3159 - DNA, 16 bp, synthetic construct
  source 1..16: mol_type = other DNA
ttatagcgttcacaac

SEQ ID NO: 3160 - DNA, 16 bp, synthetic construct
  source 1..16: mol_type = other DNA
tatagcgttcacaact

SEQ ID NO: 3161 - DNA, 16 bp, synthetic construct
  source 1..16: mol_type = other DNA
tagcgttcacaactac

SEQ ID NO: 3162 - DNA, 16 bp, synthetic construct
  source 1..16: mol_type = other DNA
agcgttcacaactaca

SEQ ID NO: 3163 - DNA, 16 bp, synthetic construct
  source 1..16: mol_type = other DNA
gcgttcacaactacag

SEQ ID NO: 3164 - DNA, 16 bp, synthetic construct
  source 1..16: mol_type = other DNA
cgttcacaactacaga

SEQ ID NO: 3165 - DNA, 16 bp, synthetic construct
  source 1..16: mol_type = other DNA
gaccctgtcatacgtt

SEQ ID NO: 3166 - DNA, 16 bp, synthetic construct
  source 1..16: mol_type = other DNA
accctgtcatacgtta

SEQ ID NO: 3167 - DNA, 16 bp, synthetic construct
  source 1..16: mol_type = other DNA
gtcatacgttactttg

SEQ ID NO: 3168 - DNA, 16 bp, synthetic construct
  source 1..16: mol_type = other DNA
gcatacacgaccttcc

SEQ ID NO: 3169 - DNA, 16 bp, synthetic construct
  source 1..16: mol_type = other DNA
catacgttactttgac

SEQ ID NO: 3170 - DNA, 16 bp, synthetic construct
  source 1..16: mol_type = other DNA
acgctacttccttaag

SEQ ID NO: 3171 - DNA, 16 bp, synthetic construct
  source 1..16: mol_type = other DNA
ttctaagtctcgtgca

SEQ ID NO: 3172 - DNA, 16 bp, synthetic construct
  source 1..16: mol_type = other DNA
tctaagtctcgtgcaa

SEQ ID NO: 3173 - DNA, 16 bp, synthetic construct
  source 1..16: mol_type = other DNA
ctaagtctcgtgcaat

SEQ ID NO: 3174 - DNA, 16 bp, synthetic construct
  source 1..16: mol_type = other DNA
taagtctcgtgcaatt

SEQ ID NO: 3175 - DNA, 16 bp, synthetic construct
  source 1..16: mol_type = other DNA
aagtctcgtgcaattg

SEQ ID NO: 3176 - DNA, 16 bp, synthetic construct
  source 1..16: mol_type = other DNA
agtctcgtgcaattgg

SEQ ID NO: 3177 - DNA, 16 bp, synthetic construct
  source 1..16: mol_type = other DNA
gtctcgtgcaattggt

SEQ ID NO: 3178 - DNA, 16 bp, synthetic construct
  source 1..16: mol_type = other DNA
ggaatacgccactttc

SEQ ID NO: 3179 - DNA, 16 bp, synthetic construct
  source 1..16: mol_type = other DNA
actttcggcttaggta

SEQ ID NO: 3180 - DNA, 16 bp, synthetic construct
  source 1..16: mol_type = other DNA
ctttcggcttaggtaa

SEQ ID NO: 3181 - DNA, 16 bp, synthetic construct
  source 1..16: mol_type = other DNA
tttcggcttaggtaaa

SEQ ID NO: 3182 - DNA, 16 bp, synthetic construct
  source 1..16: mol_type = other DNA
ttcggcttaggtaaag

SEQ ID NO: 3183 - DNA, 16 bp, synthetic construct
  source 1..16: mol_type = other DNA
tcggcttaggtaaaga

SEQ ID NO: 3184 - DNA, 16 bp, synthetic construct
  source 1..16: mol_type = other DNA
tctcgtgcaattggtg

SEQ ID NO: 3185 - DNA, 16 bp, synthetic construct
  source 1..16: mol_type = other DNA
ctcgtgcaattggtgt

SEQ ID NO: 3186 - DNA, 16 bp, synthetic construct
  source 1..16: mol_type = other DNA
tcgtgcaattggtgtc

SEQ ID NO: 3187 - DNA, 16 bp, synthetic construct
  source 1..16: mol_type = other DNA
cgtgcaattggtgtct

SEQ ID NO: 3188 - DNA, 16 bp, synthetic construct
  source 1..16: mol_type = other DNA
atcgtgtgagatgagt

SEQ ID NO: 3189 - DNA, 16 bp, synthetic construct
  source 1..16: mol_type = other DNA
tcgtgtgagatgagta

SEQ ID NO: 3190 - DNA, 16 bp, synthetic construct
  source 1..16: mol_type = other DNA
tatctgaagggttgcg

SEQ ID NO: 3191 - DNA, 16 bp, synthetic construct
  source 1..16: mol_type = other DNA
atctgaagggttgcgg

SEQ ID NO: 3192 - DNA, 16 bp, synthetic construct
  source 1..16: mol_type = other DNA
tctgaagggttgcggt

SEQ ID NO: 3193 - DNA, 16 bp, synthetic construct
  source 1..16: mol_type = other DNA
ctgaagggttgcggtt

SEQ ID NO: 3194 - DNA, 16 bp, synthetic construct
  source 1..16: mol_type = other DNA
tgaagggttgcggttg

SEQ ID NO: 3195 - DNA, 16 bp, synthetic construct
  source 1..16: mol_type = other DNA
aagggttgcggttgat

SEQ ID NO: 3196 - DNA, 16 bp, synthetic construct
  source 1..16: mol_type = other DNA
agggttgcggttgata

SEQ ID NO: 3197 - DNA, 16 bp, synthetic construct
  source 1..16: mol_type = other DNA
gggttgcggttgataa

SEQ ID NO: 3198 - DNA, 16 bp, synthetic construct
  source 1..16: mol_type = other DNA
ggttgcggttgataaa

SEQ ID NO: 3199 - DNA, 16 bp, synthetic construct
  source 1..16: mol_type = other DNA
gttgcggttgataaat

SEQ ID NO: 3200 - DNA, 16 bp, synthetic construct
  source 1..16: mol_type = other DNA
tcattaagtcccgtta

SEQ ID NO: 3201 - DNA, 16 bp, synthetic construct
  source 1..16: mol_type = other DNA
cattaagtcccgttag

SEQ ID NO: 3202 - DNA, 16 bp, synthetic construct
  source 1..16: mol_type = other DNA
attaagtcccgttagc

SEQ ID NO: 3203 - DNA, 16 bp, synthetic construct
  source 1..16: mol_type = other DNA
ttaagtcccgttagca

SEQ ID NO: 3204 - DNA, 16 bp, synthetic construct
  source 1..16: mol_type = other DNA
taagtcccgttagcaa

SEQ ID NO: 3205 - DNA, 16 bp, synthetic construct
  source 1..16: mol_type = other DNA
gtcccgttagcaactc

SEQ ID NO: 3206 - DNA, 16 bp, synthetic construct
  source 1..16: mol_type = other DNA
ccgttagcaactcttg

SEQ ID NO: 3207 - DNA, 16 bp, synthetic construct
  source 1..16: mol_type = other DNA
cgttagcaactcttga

SEQ ID NO: 3208 - DNA, 16 bp, synthetic construct
  source 1..16: mol_type = other DNA
ccttctgaaatcatcg

SEQ ID NO: 3209 - DNA, 16 bp, synthetic construct
  source 1..16: mol_type = other DNA
gaaatcatcgtgtgag

SEQ ID NO: 3210 - DNA, 16 bp, synthetic construct
  source 1..16: mol_type = other DNA
aaatcatcgtgtgaga

SEQ ID NO: 3211 - DNA, 16 bp, synthetic construct
  source 1..16: mol_type = other DNA
ttgtggttaactttcg

SEQ ID NO: 3212 - DNA, 16 bp, synthetic construct
  source 1..16: mol_type = other DNA
tgtggttaactttcgt

SEQ ID NO: 3213 - DNA, 16 bp, synthetic construct
  source 1..16: mol_type = other DNA
aagtccgtgcttgtca

SEQ ID NO: 3214 - DNA, 16 bp, synthetic construct
  source 1..16: mol_type = other DNA
gtggttaactttcgta

SEQ ID NO: 3215 - DNA, 16 bp, synthetic construct
  source 1..16: mol_type = other DNA
tggttaactttcgtag

SEQ ID NO: 3216 - DNA, 16 bp, synthetic construct
  source 1..16: mol_type = other DNA
ggttaactttcgtaga

SEQ ID NO: 3217 - DNA, 16 bp, synthetic construct
  source 1..16: mol_type = other DNA
atatactctgggctcg

SEQ ID NO: 3218 - DNA, 16 bp, synthetic construct
  source 1..16: mol_type = other DNA
tatactctgggctcga

SEQ ID NO: 3219 - DNA, 16 bp, synthetic construct
  source 1..16: mol_type = other DNA
atactctgggctcgat

SEQ ID NO: 3220 - DNA, 16 bp, synthetic construct
  source 1..16: mol_type = other DNA
tactctgggctcgatg

SEQ ID NO: 3221 - DNA, 16 bp, synthetic construct
  source 1..16: mol_type = other DNA
actctgggctcgatgt

SEQ ID NO: 3222 - DNA, 16 bp, synthetic construct
  source 1..16: mol_type = other DNA
ctctgggctcgatgta

SEQ ID NO: 3223 - DNA, 16 bp, synthetic construct
  source 1..16: mol_type = other DNA
ctcgatgtaagccatg

SEQ ID NO: 3224 - DNA, 16 bp, synthetic construct
  source 1..16: mol_type = other DNA
cctacaatgaccagcg

SEQ ID NO: 3225 - DNA, 16 bp, synthetic construct
  source 1..16: mol_type = other DNA
ctacaatgaccagcga

SEQ ID NO: 3226 - DNA, 16 bp, synthetic construct
  source 1..16: mol_type = other DNA
acgttaattcctcatg

SEQ ID NO: 3227 - DNA, 16 bp, synthetic construct
  source 1..16: mol_type = other DNA
cgttaattcctcatgg

SEQ ID NO: 3228 - DNA, 16 bp, synthetic construct
  source 1..16: mol_type = other DNA
aggttcaagtatcacg

SEQ ID NO: 3229 - DNA, 16 bp, synthetic construct
  source 1..16: mol_type = other DNA
ggttcaagtatcacgg

SEQ ID NO: 3230 - DNA, 16 bp, synthetic construct
  source 1..16: mol_type = other DNA
gttcaagtatcacggt

SEQ ID NO: 3231 - DNA, 16 bp, synthetic construct
  source 1..16: mol_type = other DNA
ttcaagtatcacggtt

SEQ ID NO: 3232 - DNA, 16 bp, synthetic construct
  source 1..16: mol_type = other DNA
tcaagtatcacggttg

SEQ ID NO: 3233 - DNA, 16 bp, synthetic construct
  source 1..16: mol_type = other DNA
caagtatcacggttgt

SEQ ID NO: 3234 - DNA, 16 bp, synthetic construct
  source 1..16: mol_type = other DNA
aagtatcacggttgtc

SEQ ID NO: 3235 - DNA, 16 bp, synthetic construct
  source 1..16: mol_type = other DNA
aaatgttggcgacatg

SEQ ID NO: 3236 - DNA, 16 bp, synthetic construct
  source 1..16: mol_type = other DNA
aatgttggcgacatgc

SEQ ID NO: 3237 - DNA, 16 bp, synthetic construct
  source 1..16: mol_type = other DNA
agagtcggtgtgtaac

SEQ ID NO: 3238 - DNA, 16 bp, synthetic construct
  source 1..16: mol_type = other DNA
gagtcggtgtgtaact

SEQ ID NO: 3239 - DNA, 16 bp, synthetic construct
  source 1..16: mol_type = other DNA
agtcggtgtgtaactg

SEQ ID NO: 3240 - DNA, 16 bp, synthetic construct
  source 1..16: mol_type = other DNA
gtcggtgtgtaactgc

SEQ ID NO: 3241 - DNA, 16 bp, synthetic construct
  source 1..16: mol_type = other DNA
tcggtgtgtaactgca

SEQ ID NO: 3242 - DNA, 16 bp, synthetic construct
  source 1..16: mol_type = other DNA
cggtgtgtaactgcaa

SEQ ID NO: 3243 - DNA, 16 bp, synthetic construct
  source 1..16: mol_type = other DNA
caaagaccacaattcg

SEQ ID NO: 3244 - DNA, 16 bp, synthetic construct
  source 1..16: mol_type = other DNA
aaagaccacaattcgt

SEQ ID NO: 3245 - DNA, 16 bp, synthetic construct
  source 1..16: mol_type = other DNA
agaccacaattcgtat

SEQ ID NO: 3246 - DNA, 16 bp, synthetic construct
  source 1..16: mol_type = other DNA
gaccacaattcgtatg

SEQ ID NO: 3247 - DNA, 16 bp, synthetic construct
  source 1..16: mol_type = other DNA
accacaattcgtatgt

SEQ ID NO: 3248 - DNA, 16 bp, synthetic construct
  source 1..16: mol_type = other DNA
acatgttacgaagtga

SEQ ID NO: 3249 - DNA, 16 bp, synthetic construct
  source 1..16: mol_type = other DNA
ccggttaagatgctac

SEQ ID NO: 3250 - DNA, 16 bp, synthetic construct
  source 1..16: mol_type = other DNA
cggttaagatgctaca

SEQ ID NO: 3251 - DNA, 16 bp, synthetic construct
  source 1..16: mol_type = other DNA
tgatggcggtgttgta

SEQ ID NO: 3252 - DNA, 16 bp, synthetic construct
  source 1..16: mol_type = other DNA
gatggcggtgttgtac

SEQ ID NO: 3253 - DNA, 16 bp, synthetic construct
  source 1..16: mol_type = other DNA
gtctgggaggagttcg

SEQ ID NO: 3254 - DNA, 16 bp, synthetic construct
  source 1..16: mol_type = other DNA
tctgggaggagttcga

SEQ ID NO: 3255 - DNA, 16 bp, synthetic construct
  source 1..16: mol_type = other DNA
gcctgtgccgtccaat

SEQ ID NO: 3256 - DNA, 16 bp, synthetic construct
  source 1..16: mol_type = other DNA
ccaatgtagggaccgc

SEQ ID NO: 3257 - DNA, 16 bp, synthetic construct
  source 1..16: mol_type = other DNA
ctctgagtgacgtagc

SEQ ID NO: 3258 - DNA, 16 bp, synthetic construct
  source 1..16: mol_type = other DNA
gcgtgatggattggct

SEQ ID NO: 3259 - DNA, 16 bp, synthetic construct
  source 1..16: mol_type = other DNA
cgtgatggattggcta

SEQ ID NO: 3260 - DNA, 16 bp, synthetic construct
  source 1..16: mol_type = other DNA
gattggctatgtggcg

SEQ ID NO: 3261 - DNA, 16 bp, synthetic construct
  source 1..16: mol_type = other DNA
attggctatgtggcgt

SEQ ID NO: 3262 - DNA, 16 bp, synthetic construct
  source 1..16: mol_type = other DNA
ttggctatgtggcgta

SEQ ID NO: 3263 - DNA, 16 bp, synthetic construct
  source 1..16: mol_type = other DNA
gctatgtggcgtaagg

SEQ ID NO: 3264 - DNA, 16 bp, synthetic construct
  source 1..16: mol_type = other DNA
ctatgtggcgtaaggg

SEQ ID NO: 3265 - DNA, 16 bp, synthetic construct
  source 1..16: mol_type = other DNA
tctgagtgacgtagca

SEQ ID NO: 3266 - DNA, 16 bp, synthetic construct
  source 1..16: mol_type = other DNA
gtgacgtagcacctat

SEQ ID NO: 3267 - DNA, 16 bp, synthetic construct
  source 1..16: mol_type = other DNA
gacgtagcacctatct

SEQ ID NO: 3268 - DNA, 16 bp, synthetic construct
  source 1..16: mol_type = other DNA
acgtagcacctatctg

SEQ ID NO: 3269 - DNA, 16 bp, synthetic construct
  source 1..16: mol_type = other DNA
cgtagcacctatctga

SEQ ID NO: 3270 - DNA, 16 bp, synthetic construct
  source 1..16: mol_type = other DNA
ccatttcgtggttgga

SEQ ID NO: 3271 - DNA, 16 bp, synthetic construct
  source 1..16: mol_type = other DNA
aatggctattctccgt

SEQ ID NO: 3272 - DNA, 16 bp, synthetic construct
  source 1..16: mol_type = other DNA
ggctattctccgtcaa

SEQ ID NO: 3273 - DNA, 16 bp, synthetic construct
  source 1..16: mol_type = other DNA
catttcgtggttggat

SEQ ID NO: 3274 - DNA, 16 bp, synthetic construct
  source 1..16: mol_type = other DNA
tttcgtggttggattg

SEQ ID NO: 3275 - DNA, 16 bp, synthetic construct
  source 1..16: mol_type = other DNA
ttcgtggttggattgg

SEQ ID NO: 3276 - DNA, 16 bp, synthetic construct
  source 1..16: mol_type = other DNA
taggctgtttcttacg

SEQ ID NO: 3277 - DNA, 16 bp, synthetic construct
  source 1..16: mol_type = other DNA
tacccgctctcatagg

SEQ ID NO: 3278 - DNA, 16 bp, synthetic construct
  source 1..16: mol_type = other DNA
ccgctctcatagggta

SEQ ID NO: 3279 - DNA, 16 bp, synthetic construct
  source 1..16: mol_type = other DNA
cgctctcatagggtat

SEQ ID NO: 3280 - DNA, 16 bp, synthetic construct
  source 1..16: mol_type = other DNA
tatggagcgtagcagc

SEQ ID NO: 3281 - DNA, 16 bp, synthetic construct
  source 1..16: mol_type = other DNA
agcagccaacagttcg

SEQ ID NO: 3282 - DNA, 16 bp, synthetic construct
  source 1..16: mol_type = other DNA
gacatagtgtcccgcc

SEQ ID NO: 3283 - DNA, 16 bp, synthetic construct
  source 1..16: mol_type = other DNA
acatagtgtcccgccc

SEQ ID NO: 3284 - DNA, 16 bp, synthetic construct
  source 1..16: mol_type = other DNA
catagtgtcccgccca

SEQ ID NO: 3285 - DNA, 16 bp, synthetic construct
  source 1..16: mol_type = other DNA
atagtgtcccgcccat

SEQ ID NO: 3286 - DNA, 16 bp, synthetic construct
  source 1..16: mol_type = other DNA
aacgttgtctcctgta

SEQ ID NO: 3287 - DNA, 16 bp, synthetic construct
  source 1..16: mol_type = other DNA
acgttgtctcctgtag

SEQ ID NO: 3288 - DNA, 16 bp, synthetic construct
  source 1..16: mol_type = other DNA
taaatacgttgtggct

SEQ ID NO: 3289 - DNA, 16 bp, synthetic construct
  source 1..16: mol_type = other DNA
aatacgttgtggctat

SEQ ID NO: 3290 - DNA, 16 bp, synthetic construct
  source 1..16: mol_type = other DNA
atacgttgtggctatg

SEQ ID NO: 3291 - DNA, 16 bp, synthetic construct
  source 1..16: mol_type = other DNA
tacgttgtggctatgg

SEQ ID NO: 3292 - DNA, 16 bp, synthetic construct
  source 1..16: mol_type = other DNA
acgttgtggctatggg

SEQ ID NO: 3293 - DNA, 16 bp, synthetic construct
  source 1..16: mol_type = other DNA
tgctgcatcccgtaga

SEQ ID NO: 3294 - DNA, 16 bp, synthetic construct
  source 1..16: mol_type = other DNA
tcaaccttgtctcgga

SEQ ID NO: 3295 - DNA, 16 bp, synthetic construct
  source 1..16: mol_type = other DNA
aggaaatacgctcaat

SEQ ID NO: 3296 - DNA, 16 bp, synthetic construct
  source 1..16: mol_type = other DNA
ggaaatacgctcaatt

SEQ ID NO: 3297 - DNA, 16 bp, synthetic construct
  source 1..16: mol_type = other DNA
acgctcaattattgtg

SEQ ID NO: 3298 - DNA, 16 bp, synthetic construct
  source 1..16: mol_type = other DNA
cgctcaattattgtga

SEQ ID NO: 3299 - DNA, 16 bp, synthetic construct
  source 1..16: mol_type = other DNA
caaccttgtctcggat

SEQ ID NO: 3300 - DNA, 16 bp, synthetic construct
  source 1..16: mol_type = other DNA
cggtcacaattctatt

SEQ ID NO: 3301 - DNA, 16 bp, synthetic construct
  source 1..16: mol_type = other DNA
gaattcaaacggtagt

SEQ ID NO: 3302 - DNA, 16 bp, synthetic construct
  source 1..16: mol_type = other DNA
acggtagtttgattga

SEQ ID NO: 3303 - DNA, 16 bp, synthetic construct
  source 1..16: mol_type = other DNA
aaccttgtctcggatc

SEQ ID NO: 3304 - DNA, 16 bp, synthetic construct
  source 1..16: mol_type = other DNA
ggataactcagacggt

SEQ ID NO: 3305 - DNA, 16 bp, synthetic construct
  source 1..16: mol_type = other DNA
gataactcagacggtt

SEQ ID NO: 3306 - DNA, 16 bp, synthetic construct
  source 1..16: mol_type = other DNA
ataactcagacggttg

SEQ ID NO: 3307 - DNA, 16 bp, synthetic construct
  source 1..16: mol_type = other DNA
taactcagacggttga

SEQ ID NO: 3308 - DNA, 16 bp, synthetic construct
  source 1..16: mol_type = other DNA
aactcagacggttgaa

SEQ ID NO: 3309 - DNA, 16 bp, synthetic construct
  source 1..16: mol_type = other DNA
actcagacggttgaac

SEQ ID NO: 3310 - DNA, 16 bp, synthetic construct
  source 1..16: mol_type = other DNA
agagaacctgactgcg

SEQ ID NO: 3311 - DNA, 16 bp, synthetic construct
  source 1..16: mol_type = other DNA
tacgtacaccagcagt

SEQ ID NO: 3312 - DNA, 16 bp, synthetic construct
  source 1..16: mol_type = other DNA
ctgagtcacgctgaaa

SEQ ID NO: 3313 - DNA, 16 bp, synthetic construct
  source 1..16: mol_type = other DNA
tgagtcacgctgaaag

SEQ ID NO: 3314 - DNA, 16 bp, synthetic construct
  source 1..16: mol_type = other DNA
agcgtgaggtgcttcc

SEQ ID NO: 3315 - DNA, 16 bp, synthetic construct
  source 1..16: mol_type = other DNA
gcgtgaggtgcttcct

SEQ ID NO: 3316 - DNA, 16 bp, synthetic construct
  source 1..16: mol_type = other DNA
cgtgttgcataggtaa

SEQ ID NO: 3317 - DNA, 16 bp, synthetic construct
  source 1..16: mol_type = other DNA
cagaaatcagtcacgc

SEQ ID NO: 3318 - DNA, 16 bp, synthetic construct
  source 1..16: mol_type = other DNA
agaaatcagtcacgcc

SEQ ID NO: 3319 - DNA, 16 bp, synthetic construct
  source 1..16: mol_type = other DNA
gaaatcagtcacgcct

SEQ ID NO: 3320 - DNA, 16 bp, synthetic construct
  source 1..16: mol_type = other DNA
aaatcagtcacgccta

SEQ ID NO: 3321 - DNA, 16 bp, synthetic construct
  source 1..16: mol_type = other DNA
aatcagtcacgcctag

SEQ ID NO: 3322 - DNA, 16 bp, synthetic construct
  source 1..16: mol_type = other DNA
atcagtcacgcctaga

SEQ ID NO: 3323 - DNA, 16 bp, synthetic construct
  source 1..16: mol_type = other DNA
tcagtcacgcctagat

SEQ ID NO: 3324 - DNA, 16 bp, synthetic construct
  source 1..16: mol_type = other DNA
cagtcacgcctagata

SEQ ID NO: 3325 - DNA, 16 bp, synthetic construct
  source 1..16: mol_type = other DNA
agtcacgcctagatac

SEQ ID NO: 3326 - DNA, 16 bp, synthetic construct
  source 1..16: mol_type = other DNA
gtcacgcctagataca

SEQ ID NO: 3327 - DNA, 16 bp, synthetic construct
  source 1..16: mol_type = other DNA
tcacgcctagatacat

SEQ ID NO: 3328 - DNA, 16 bp, synthetic construct
  source 1..16: mol_type = other DNA
gttaatctttagccgg

SEQ ID NO: 3329 - DNA, 16 bp, synthetic construct
  source 1..16: mol_type = other DNA
ttattgggtcatcgta

SEQ ID NO: 3330 - DNA, 16 bp, synthetic construct
  source 1..16: mol_type = other DNA
tattgggtcatcgtac

SEQ ID NO: 3331 - DNA, 16 bp, synthetic construct
  source 1..16: mol_type = other DNA
attgggtcatcgtact

SEQ ID NO: 3332 - DNA, 16 bp, synthetic construct
  source 1..16: mol_type = other DNA
ttgggtcatcgtactc

SEQ ID NO: 3333 - DNA, 16 bp, synthetic construct
  source 1..16: mol_type = other DNA
gggtcatcgtactcca

SEQ ID NO: 3334 - DNA, 16 bp, synthetic construct
  source 1..16: mol_type = other DNA
ggtcatcgtactccat

SEQ ID NO: 3335 - DNA, 16 bp, synthetic construct
  source 1..16: mol_type = other DNA
ccggacaattatagaa

SEQ ID NO: 3336 - DNA, 16 bp, synthetic construct
  source 1..16: mol_type = other DNA
cggacaattatagaac

SEQ ID NO: 3337 - DNA, 16 bp, synthetic construct
  source 1..16: mol_type = other DNA
taatgaactatccgag

SEQ ID NO: 3338 - DNA, 16 bp, synthetic construct
  source 1..16: mol_type = other DNA
aatgaactatccgagc

SEQ ID NO: 3339 - DNA, 16 bp, synthetic construct
  source 1..16: mol_type = other DNA
atgaactatccgagca

SEQ ID NO: 3340 - DNA, 16 bp, synthetic construct
  source 1..16: mol_type = other DNA
tgaactatccgagcac

SEQ ID NO: 3341 - DNA, 16 bp, synthetic construct
  source 1..16: mol_type = other DNA
gaactatccgagcacc

SEQ ID NO: 3342 - DNA, 16 bp, synthetic construct
  source 1..16: mol_type = other DNA
tttgcgagtcagtagg

SEQ ID NO: 3343 - DNA, 16 bp, synthetic construct
  source 1..16: mol_type = other DNA
ttgcgagtcagtagga

SEQ ID NO: 3344 - DNA, 16 bp, synthetic construct
  source 1..16: mol_type = other DNA
tgcgagtcagtaggat

SEQ ID NO: 3345 - DNA, 16 bp, synthetic construct
  source 1..16: mol_type = other DNA
gcgagtcagtaggatt

SEQ ID NO: 3346 - DNA, 16 bp, synthetic construct
  source 1..16: mol_type = other DNA
cgagtcagtaggattt

SEQ ID NO: 3347 - DNA, 16 bp, synthetic construct
  source 1..16: mol_type = other DNA
gtccacacgatactta

SEQ ID NO: 3348 - DNA, 16 bp, synthetic construct
  source 1..16: mol_type = other DNA
tccacacgatacttat

SEQ ID NO: 3349 - DNA, 16 bp, synthetic construct
  source 1..16: mol_type = other DNA
ccacacgatacttatt

SEQ ID NO: 3350 - DNA, 16 bp, synthetic construct
  source 1..16: mol_type = other DNA
gaatacccacgtttga

SEQ ID NO: 3351 - DNA, 16 bp, synthetic construct
  source 1..16: mol_type = other DNA
aatacccacgtttgat

SEQ ID NO: 3352 - DNA, 16 bp, synthetic construct
  source 1..16: mol_type = other DNA
atacccacgtttgatc

SEQ ID NO: 3353 - DNA, 16 bp, synthetic construct
  source 1..16: mol_type = other DNA
acccacgtttgatctg

SEQ ID NO: 3354 - DNA, 16 bp, synthetic construct
  source 1..16: mol_type = other DNA
cactttagcatgaacg

SEQ ID NO: 3355 - DNA, 16 bp, synthetic construct
  source 1..16: mol_type = other DNA
actttagcatgaacgt

SEQ ID NO: 3356 - DNA, 16 bp, synthetic construct
  source 1..16: mol_type = other DNA
ctttagcatgaacgtg

SEQ ID NO: 3357 - DNA, 16 bp, synthetic construct
  source 1..16: mol_type = other DNA
tttagcatgaacgtga

SEQ ID NO: 3358 - DNA, 16 bp, synthetic construct
  source 1..16: mol_type = other DNA
ttagcatgaacgtgag

SEQ ID NO: 3359 - DNA, 16 bp, synthetic construct
  source 1..16: mol_type = other DNA
ttcaaagtgtgcgttc

SEQ ID NO: 3360 - DNA, 16 bp, synthetic construct
  source 1..16: mol_type = other DNA
cgttctgtgtataaac

SEQ ID NO: 3361 - DNA, 16 bp, synthetic construct
  source 1..16: mol_type = other DNA
ctcctgttatacgtgg

SEQ ID NO: 3362 - DNA, 16 bp, synthetic construct
  source 1..16: mol_type = other DNA
tcctgttatacgtggt

SEQ ID NO: 3363 - DNA, 16 bp, synthetic construct
  source 1..16: mol_type = other DNA
ctgttatacgtggtcc

SEQ ID NO: 3364 - DNA, 16 bp, synthetic construct
  source 1..16: mol_type = other DNA
tgttatacgtggtcct

SEQ ID NO: 3365 - DNA, 16 bp, synthetic construct
  source 1..16: mol_type = other DNA
gttatacgtggtcctc

SEQ ID NO: 3366 - DNA, 16 bp, synthetic construct
  source 1..16: mol_type = other DNA
ggacccgcaatataga

SEQ ID NO: 3367 - DNA, 16 bp, synthetic construct
  source 1..16: mol_type = other DNA
gacccgcaatatagag

SEQ ID NO: 3368 - DNA, 16 bp, synthetic construct
  source 1..16: mol_type = other DNA
ccgcaatatagaggac

SEQ ID NO: 3369 - DNA, 16 bp, synthetic construct
  source 1..16: mol_type = other DNA
cgcaatatagaggacc

SEQ ID NO: 3370 - DNA, 16 bp, synthetic construct
  source 1..16: mol_type = other DNA
gagcgtttgtgtctac

SEQ ID NO: 3371 - DNA, 16 bp, synthetic construct
  source 1..16: mol_type = other DNA
agcgtttgtgtctaca

SEQ ID NO: 3372 - DNA, 16 bp, synthetic construct
  source 1..16: mol_type = other DNA
gccaattacatcaacg

SEQ ID NO: 3373 - DNA, 16 bp, synthetic construct
  source 1..16: mol_type = other DNA
ccaattacatcaacgg

SEQ ID NO: 3374 - DNA, 16 bp, synthetic construct
  source 1..16: mol_type = other DNA
tttgtagcgtgtaacc

SEQ ID NO: 3375 - DNA, 16 bp, synthetic construct
  source 1..16: mol_type = other DNA
ttgtagcgtgtaaccc

SEQ ID NO: 3376 - DNA, 16 bp, synthetic construct
  source 1..16: mol_type = other DNA
aaccacagacgttgaa

SEQ ID NO: 3377 - DNA, 16 bp, synthetic construct
  source 1..16: mol_type = other DNA
attcaccaaaccttcg

SEQ ID NO: 3378 - DNA, 16 bp, synthetic construct
  source 1..16: mol_type = other DNA
acagataaactttccg

SEQ ID NO: 3379 - DNA, 16 bp, synthetic construct
  source 1..16: mol_type = other DNA
cagataaactttccga

SEQ ID NO: 3380 - DNA, 16 bp, synthetic construct
  source 1..16: mol_type = other DNA
gaagtgttgaacgtac

SEQ ID NO: 3381 - DNA, 16 bp, synthetic construct
  source 1..16: mol_type = other DNA
aagtgttgaacgtaca

SEQ ID NO: 3382 - DNA, 16 bp, synthetic construct
  source 1..16: mol_type = other DNA
cgtacaacagattcct

SEQ ID NO: 3383 - DNA, 16 bp, synthetic construct
  source 1..16: mol_type = other DNA
ttagaaatacggtgac

SEQ ID NO: 3384 - DNA, 16 bp, synthetic construct
  source 1..16: mol_type = other DNA
tggtttagagagcggt

SEQ ID NO: 3385 - DNA, 16 bp, synthetic construct
  source 1..16: mol_type = other DNA
ggtttagagagcggtt

SEQ ID NO: 3386 - DNA, 16 bp, synthetic construct
  source 1..16: mol_type = other DNA
gtttagagagcggtta

SEQ ID NO: 3387 - DNA, 16 bp, synthetic construct
  source 1..16: mol_type = other DNA
gagcggttagattgat

SEQ ID NO: 3388 - DNA, 16 bp, synthetic construct
  source 1..16: mol_type = other DNA
agcggttagattgatg

SEQ ID NO: 3389 - DNA, 16 bp, synthetic construct
  source 1..16: mol_type = other DNA
gctgccgtaagttatc

SEQ ID NO: 3390 - DNA, 16 bp, synthetic construct
  source 1..16: mol_type = other DNA
ctgccgtaagttatca

SEQ ID NO: 3391 - DNA, 16 bp, synthetic construct
  source 1..16: mol_type = other DNA
tgccgtaagttatcac

SEQ ID NO: 3392 - DNA, 16 bp, synthetic construct
  source 1..16: mol_type = other DNA
gccgtaagttatcaca

SEQ ID NO: 3393 - DNA, 16 bp, synthetic construct
  source 1..16: mol_type = other DNA
cgtaagttatcacaga

SEQ ID NO: 3394 - DNA, 16 bp, synthetic construct
  source 1..16: mol_type = other DNA
taaccagggacgcagt

SEQ ID NO: 3395 - DNA, 16 bp, synthetic construct
  source 1..16: mol_type = other DNA
accagggacgcagtgt

SEQ ID NO: 3396 - DNA, 16 bp, synthetic construct
  source 1..16: mol_type = other DNA
cagagcgtaacaaacc

SEQ ID NO: 3397 - DNA, 16 bp, synthetic construct
  source 1..16: mol_type = other DNA
gcgtaacaaaccagac

SEQ ID NO: 3398 - DNA, 16 bp, synthetic construct
  source 1..16: mol_type = other DNA
cgtaacaaaccagaca

SEQ ID NO: 3399 - DNA, 16 bp, synthetic construct
  source 1..16: mol_type = other DNA
agatggtctcacaacg

SEQ ID NO: 3400 - DNA, 16 bp, synthetic construct
  source 1..16: mol_type = other DNA
gatggtctcacaacgg

SEQ ID NO: 3401 - DNA, 16 bp, synthetic construct
  source 1..16: mol_type = other DNA
atggtctcacaacggc

SEQ ID NO: 3402 - DNA, 16 bp, synthetic construct
  source 1..16: mol_type = other DNA
tcgttacaactcactg

SEQ ID NO: 3403 - DNA, 16 bp, synthetic construct
  source 1..16: mol_type = other DNA
cattactgtattgccg

SEQ ID NO: 3404 - DNA, 16 bp, synthetic construct
  source 1..16: mol_type = other DNA
actgtattgccgtcta

SEQ ID NO: 3405 - DNA, 16 bp, synthetic construct
  source 1..16: mol_type = other DNA
ctgttggttgattccg

SEQ ID NO: 3406 - DNA, 16 bp, synthetic construct
  source 1..16: mol_type = other DNA
tgttggttgattccgc

SEQ ID NO: 3407 - DNA, 16 bp, synthetic construct
  source 1..16: mol_type = other DNA
ttggttgattccgcac

SEQ ID NO: 3408 - DNA, 16 bp, synthetic construct
  source 1..16: mol_type = other DNA
ggttgattccgcacct

SEQ ID NO: 3409 - DNA, 16 bp, synthetic construct
  source 1..16: mol_type = other DNA
tgattccgcaccttga

SEQ ID NO: 3410 - DNA, 16 bp, synthetic construct
  source 1..16: mol_type = other DNA
gattccgcaccttgac

SEQ ID NO: 3411 - DNA, 16 bp, synthetic construct
  source 1..16: mol_type = other DNA
ccgcaccttgacttga

SEQ ID NO: 3412 - DNA, 16 bp, synthetic construct
  source 1..16: mol_type = other DNA
cgcaccttgacttgaa

SEQ ID NO: 3413 - DNA, 16 bp, synthetic construct
  source 1..16: mol_type = other DNA
tcctagagaagacgat

SEQ ID NO: 3414 - DNA, 16 bp, synthetic construct
  source 1..16: mol_type = other DNA
agacagcattgactcg

SEQ ID NO: 3415 - DNA, 16 bp, synthetic construct
  source 1..16: mol_type = other DNA
gacagcattgactcga

SEQ ID NO: 3416 - DNA, 16 bp, synthetic construct
  source 1..16: mol_type = other DNA
acagcattgactcgat

SEQ ID NO: 3417 - DNA, 16 bp, synthetic construct
  source 1..16: mol_type = other DNA
cattgactcgatggta

SEQ ID NO: 3418 - DNA, 16 bp, synthetic construct
  source 1..16: mol_type = other DNA
attgactcgatggtac

SEQ ID NO: 3419 - DNA, 16 bp, synthetic construct
  source 1..16: mol_type = other DNA
ttgactcgatggtact

SEQ ID NO: 3420 - DNA, 16 bp, synthetic construct
  source 1..16: mol_type = other DNA
tgactcgatggtactg

SEQ ID NO: 3421 - DNA, 16 bp, synthetic construct
  source 1..16: mol_type = other DNA
gactcgatggtactgt

SEQ ID NO: 3422 - DNA, 16 bp, synthetic construct
  source 1..16: mol_type = other DNA
actcgatggtactgtt

SEQ ID NO: 3423 - DNA, 16 bp, synthetic construct
  source 1..16: mol_type = other DNA
ctcgatggtactgtta

SEQ ID NO: 3424 - DNA, 16 bp, synthetic construct
  source 1..16: mol_type = other DNA
tcgatggtactgttac

SEQ ID NO: 3425 - DNA, 16 bp, synthetic construct
  source 1..16: mol_type = other DNA
cgatggtactgttaca

SEQ ID NO: 3426 - DNA, 16 bp, synthetic construct
  source 1..16: mol_type = other DNA
gatccgaaacttagat

SEQ ID NO: 3427 - DNA, 16 bp, synthetic construct
  source 1..16: mol_type = other DNA
atccgaaacttagatg

SEQ ID NO: 3428 - DNA, 16 bp, synthetic construct
  source 1..16: mol_type = other DNA
gtacgaatggaactca

SEQ ID NO: 3429 - DNA, 16 bp, synthetic construct
  source 1..16: mol_type = other DNA
tacgaatggaactcaa

SEQ ID NO: 3430 - DNA, 16 bp, synthetic construct
  source 1..16: mol_type = other DNA
acgaatggaactcaat

SEQ ID NO: 3431 - DNA, 16 bp, synthetic construct
  source 1..16: mol_type = other DNA
cgaatggaactcaatg

SEQ ID NO: 3432 - DNA, 16 bp, synthetic construct
  source 1..16: mol_type = other DNA
tccgaaacttagatgc

SEQ ID NO: 3433 - DNA, 16 bp, synthetic construct
  source 1..16: mol_type = other DNA
ccgaaacttagatgca

SEQ ID NO: 3434 - DNA, 16 bp, synthetic construct
  source 1..16: mol_type = other DNA
cgaaacttagatgcag

SEQ ID NO: 3435 - DNA, 16 bp, synthetic construct
  source 1..16: mol_type = other DNA
gtaagtttctggagcg

SEQ ID NO: 3436 - DNA, 16 bp, synthetic construct
  source 1..16: mol_type = other DNA
gcgcttggaattgatt

SEQ ID NO: 3437 - DNA, 16 bp, synthetic construct
  source 1..16: mol_type = other DNA
cgcttggaattgattc

SEQ ID NO: 3438 - DNA, 16 bp, synthetic construct
  source 1..16: mol_type = other DNA
caatatcgcttccata

SEQ ID NO: 3439 - DNA, 16 bp, synthetic construct
  source 1..16: mol_type = other DNA
actgaagatacggatc

SEQ ID NO: 3440 - DNA, 16 bp, synthetic construct
  source 1..16: mol_type = other DNA
aatatcgcttccatag

SEQ ID NO: 3441 - DNA, 16 bp, synthetic construct
  source 1..16: mol_type = other DNA
gccatcatactgtccg

SEQ ID NO: 3442 - DNA, 16 bp, synthetic construct
  source 1..16: mol_type = other DNA
catcatactgtccgtg

SEQ ID NO: 3443 - DNA, 16 bp, synthetic construct
  source 1..16: mol_type = other DNA
atcatactgtccgtga

SEQ ID NO: 3444 - DNA, 16 bp, synthetic construct
  source 1..16: mol_type = other DNA
tcatactgtccgtgag

SEQ ID NO: 3445 - DNA, 16 bp, synthetic construct
  source 1..16: mol_type = other DNA
catactgtccgtgagc

SEQ ID NO: 3446 - DNA, 16 bp, synthetic construct
  source 1..16: mol_type = other DNA
atactgtccgtgagcc

SEQ ID NO: 3447 - DNA, 16 bp, synthetic construct
  source 1..16: mol_type = other DNA
tactgtccgtgagcca

SEQ ID NO: 3448 - DNA, 16 bp, synthetic construct
  source 1..16: mol_type = other DNA
actgtccgtgagccat

SEQ ID NO: 3449 - DNA, 16 bp, synthetic construct
  source 1..16: mol_type = other DNA
ctgtccgtgagccatc

SEQ ID NO: 3450 - DNA, 16 bp, synthetic construct
  source 1..16: mol_type = other DNA
gcaggcattgtgacgg

SEQ ID NO: 3451 - DNA, 16 bp, synthetic construct
  source 1..16: mol_type = other DNA
gcattgtgacggaagt

SEQ ID NO: 3452 - DNA, 16 bp, synthetic construct
  source 1..16: mol_type = other DNA
cattgtgacggaagta

SEQ ID NO: 3453 - DNA, 16 bp, synthetic construct
  source 1..16: mol_type = other DNA
taattacaggagtacg

SEQ ID NO: 3454 - DNA, 16 bp, synthetic construct
  source 1..16: mol_type = other DNA
attataatctgggacg

SEQ ID NO: 3455 - DNA, 16 bp, synthetic construct
  source 1..16: mol_type = other DNA
ttataatctgggacgt

SEQ ID NO: 3456 - DNA, 16 bp, synthetic construct
  source 1..16: mol_type = other DNA
aggtaggtgacggttc

SEQ ID NO: 3457 - DNA, 16 bp, synthetic construct
  source 1..16: mol_type = other DNA
ggtaggtgacggttct

SEQ ID NO: 3458 - DNA, 16 bp, synthetic construct
  source 1..16: mol_type = other DNA
gtaggtgacggttctt

SEQ ID NO: 3459 - DNA, 16 bp, synthetic construct
  source 1..16: mol_type = other DNA
taggtgacggttcttc

SEQ ID NO: 3460 - DNA, 16 bp, synthetic construct
  source 1..16: mol_type = other DNA
aggtgacggttcttcc

SEQ ID NO: 3461 - DNA, 16 bp, synthetic construct
  source 1..16: mol_type = other DNA
ggtgacggttcttcct

SEQ ID NO: 3462 - DNA, 16 bp, synthetic construct
  source 1..16: mol_type = other DNA
gccgtatctagtcctg

SEQ ID NO: 3463 - DNA, 16 bp, synthetic construct
  source 1..16: mol_type = other DNA
cacgtagaaatttagc

SEQ ID NO: 3464 - DNA, 16 bp, synthetic construct
  source 1..16: mol_type = other DNA
gggaccaccacaatag

SEQ ID NO: 3465 - DNA, 16 bp, synthetic construct
  source 1..16: mol_type = other DNA
ggaccaccacaataga

SEQ ID NO: 3466 - DNA, 16 bp, synthetic construct
  source 1..16: mol_type = other DNA
gatccttaactatcac

SEQ ID NO: 3467 - DNA, 16 bp, synthetic construct
  source 1..16: mol_type = other DNA
aagctcgttgtcttgg

SEQ ID NO: 3468 - DNA, 16 bp, synthetic construct
  source 1..16: mol_type = other DNA
agctcgttgtcttgga

SEQ ID NO: 3469 - DNA, 16 bp, synthetic construct
  source 1..16: mol_type = other DNA
gctcgttgtcttggaa

SEQ ID NO: 3470 - DNA, 16 bp, synthetic construct
  source 1..16: mol_type = other DNA
ctcgttgtcttggaac

SEQ ID NO: 3471 - DNA, 16 bp, synthetic construct
  source 1..16: mol_type = other DNA
tcgttgtcttggaact

SEQ ID NO: 3472 - DNA, 16 bp, synthetic construct
  source 1..16: mol_type = other DNA
cgttgtcttggaactg

SEQ ID NO: 3473 - DNA, 16 bp, synthetic construct
  source 1..16: mol_type = other DNA
ccatctagtagctcgc

SEQ ID NO: 3474 - DNA, 16 bp, synthetic construct
  source 1..16: mol_type = other DNA
gctcgcttatgatcta

SEQ ID NO: 3475 - DNA, 16 bp, synthetic construct
  source 1..16: mol_type = other DNA
tcgcttatgatctatg

SEQ ID NO: 3476 - DNA, 16 bp, synthetic construct
  source 1..16: mol_type = other DNA
cgcttatgatctatga

SEQ ID NO: 3477 - DNA, 16 bp, synthetic construct
  source 1..16: mol_type = other DNA
ctatagcgtgacagga

SEQ ID NO: 3478 - DNA, 16 bp, synthetic construct
  source 1..16: mol_type = other DNA
tagctggtatcgtaaa

SEQ ID NO: 3479 - DNA, 16 bp, synthetic construct
  source 1..16: mol_type = other DNA
agctggtatcgtaaag

SEQ ID NO: 3480 - DNA, 16 bp, synthetic construct
  source 1..16: mol_type = other DNA
tatagcgtgacaggat

SEQ ID NO: 3481 - DNA, 16 bp, synthetic construct
  source 1..16: mol_type = other DNA
atagcgtgacaggatt

SEQ ID NO: 3482 - DNA, 16 bp, synthetic construct
  source 1..16: mol_type = other DNA
tagcgtgacaggattg

SEQ ID NO: 3483 - DNA, 16 bp, synthetic construct
  source 1..16: mol_type = other DNA
gcgtgacaggattggt

SEQ ID NO: 3484 - DNA, 16 bp, synthetic construct
  source 1..16: mol_type = other DNA
cgtgacaggattggta

SEQ ID NO: 3485 - DNA, 16 bp, synthetic construct
  source 1..16: mol_type = other DNA
gacaacatttggctcg

SEQ ID NO: 3486 - DNA, 16 bp, synthetic construct
  source 1..16: mol_type = other DNA
acaacatttggctcgc

SEQ ID NO: 3487 - DNA, 16 bp, synthetic construct
  source 1..16: mol_type = other DNA
ctcggttggtgagcat

SEQ ID NO: 3488 - DNA, 16 bp, synthetic construct
  source 1..16: mol_type = other DNA
tcggttggtgagcatg

SEQ ID NO: 3489 - DNA, 16 bp, synthetic construct
  source 1..16: mol_type = other DNA
cataactgcattcgct

SEQ ID NO: 3490 - DNA, 16 bp, synthetic construct
  source 1..16: mol_type = other DNA
ataactgcattcgcta

SEQ ID NO: 3491 - DNA, 16 bp, synthetic construct
  source 1..16: mol_type = other DNA
taactgcattcgctaa

SEQ ID NO: 3492 - DNA, 16 bp, synthetic construct
  source 1..16: mol_type = other DNA
aactgcattcgctaaa

SEQ ID NO: 3493 - DNA, 16 bp, synthetic construct
  source 1..16: mol_type = other DNA
actgcattcgctaaat

SEQ ID NO: 3494 - DNA, 16 bp, synthetic construct
  source 1..16: mol_type = other DNA
ctgcattcgctaaatt

SEQ ID NO: 3495 - DNA, 16 bp, synthetic construct
  source 1..16: mol_type = other DNA
tgcattcgctaaattg

SEQ ID NO: 3496 - DNA, 16 bp, synthetic construct
  source 1..16: mol_type = other DNA
gcattcgctaaattga

SEQ ID NO: 3497 - DNA, 16 bp, synthetic construct
  source 1..16: mol_type = other DNA
tagcctacggtttgaa

SEQ ID NO: 3498 - DNA, 16 bp, synthetic construct
  source 1..16: mol_type = other DNA
agcctacggtttgaat

SEQ ID NO: 3499 - DNA, 16 bp, synthetic construct
  source 1..16: mol_type = other DNA
gcctacggtttgaatc

SEQ ID NO: 3500 - DNA, 16 bp, synthetic construct
  source 1..16: mol_type = other DNA
cctacggtttgaatca

SEQ ID NO: 3501 - DNA, 16 bp, synthetic construct
  source 1..16: mol_type = other DNA
ctacggtttgaatcat

SEQ ID NO: 3502 - DNA, 16 bp, synthetic construct
  source 1..16: mol_type = other DNA
cggtttgaatcatatc

SEQ ID NO: 3503 - DNA, 16 bp, synthetic construct
  source 1..16: mol_type = other DNA
aagcaacatttatccg

SEQ ID NO: 3504 - DNA, 16 bp, synthetic construct
  source 1..16: mol_type = other DNA
agcaacatttatccgt

SEQ ID NO: 3505 - DNA, 16 bp, synthetic construct
  source 1..16: mol_type = other DNA
gcaacatttatccgtg

SEQ ID NO: 3506 - DNA, 16 bp, synthetic construct
  source 1..16: mol_type = other DNA
caacatttatccgtgc

SEQ ID NO: 3507 - DNA, 16 bp, synthetic construct
  source 1..16: mol_type = other DNA
aacatttatccgtgca

SEQ ID NO: 3508 - DNA, 16 bp, synthetic construct
  source 1..16: mol_type = other DNA
catttatccgtgcata

SEQ ID NO: 3509 - DNA, 16 bp, synthetic construct
  source 1..16: mol_type = other DNA
aaaccaccaatcttcg

SEQ ID NO: 3510 - DNA, 16 bp, synthetic construct
  source 1..16: mol_type = other DNA
caatcttcggctgggc

SEQ ID NO: 3511 - DNA, 16 bp, synthetic construct
  source 1..16: mol_type = other DNA
gatatccttactcacg

SEQ ID NO: 3512 - DNA, 16 bp, synthetic construct
  source 1..16: mol_type = other DNA
atatccttactcacga

SEQ ID NO: 3513 - DNA, 16 bp, synthetic construct
  source 1..16: mol_type = other DNA
atccttactcacgata

SEQ ID NO: 3514 - DNA, 16 bp, synthetic construct
  source 1..16: mol_type = other DNA
tccttactcacgataa

SEQ ID NO: 3515 - DNA, 16 bp, synthetic construct
  source 1..16: mol_type = other DNA
ccttactcacgataaa

SEQ ID NO: 3516 - DNA, 16 bp, synthetic construct
  source 1..16: mol_type = other DNA
taaatattccgagacc

SEQ ID NO: 3517 - DNA, 16 bp, synthetic construct
  source 1..16: mol_type = other DNA
acagcgtgataaattg

SEQ ID NO: 3518 - DNA, 16 bp, synthetic construct
  source 1..16: mol_type = other DNA
cagcgtgataaattgg

SEQ ID NO: 3519 - DNA, 16 bp, synthetic construct
  source 1..16: mol_type = other DNA
gcgtgataaattggat

SEQ ID NO: 3520 - DNA, 16 bp, synthetic construct
  source 1..16: mol_type = other DNA
gcgtggtcattacata

SEQ ID NO: 3521 - DNA, 16 bp, synthetic construct
  source 1..16: mol_type = other DNA
cgtggtcattacatag

SEQ ID NO: 3522 - DNA, 16 bp, synthetic construct
  source 1..16: mol_type = other DNA
tgtttgaaagccacgc

SEQ ID NO: 3523 - DNA, 16 bp, synthetic construct
  source 1..16: mol_type = other DNA
cgcctctatggaaatc

SEQ ID NO: 3524 - DNA, 16 bp, synthetic construct
  source 1..16: mol_type = other DNA
tcacaccaattcacgt

SEQ ID NO: 3525 - DNA, 16 bp, synthetic construct
  source 1..16: mol_type = other DNA
cacaccaattcacgtt

SEQ ID NO: 3526 - DNA, 16 bp, synthetic construct
  source 1..16: mol_type = other DNA
acaccaattcacgttg

SEQ ID NO: 3527 - DNA, 16 bp, synthetic construct
  source 1..16: mol_type = other DNA
caattcacgttggaca

SEQ ID NO: 3528 - DNA, 16 bp, synthetic construct
  source 1..16: mol_type = other DNA
acacacgaatgagctt

SEQ ID NO: 3529 - DNA, 16 bp, synthetic construct
  source 1..16: mol_type = other DNA
cacacgaatgagcttc

SEQ ID NO: 3530 - DNA, 16 bp, synthetic construct
  source 1..16: mol_type = other DNA
acacgaatgagcttca

SEQ ID NO: 3531 - DNA, 16 bp, synthetic construct
  source 1..16: mol_type = other DNA
cacgaatgagcttcaa

SEQ ID NO: 3532 - DNA, 16 bp, synthetic construct
  source 1..16: mol_type = other DNA
acgaatgagcttcaaa

SEQ ID NO: 3533 - DNA, 16 bp, synthetic construct
  source 1..16: mol_type = other DNA
cgaatgagcttcaaat

SEQ ID NO: 3534 - DNA, 16 bp, synthetic construct
  source 1..16: mol_type = other DNA
tcgataatgagtaagc

SEQ ID NO: 3535 - DNA, 16 bp, synthetic construct
  source 1..16: mol_type = other DNA
cgataatgagtaagcc

SEQ ID NO: 3536 - DNA, 16 bp, synthetic construct
  source 1..16: mol_type = other DNA
agtcctcgtgaatggc

SEQ ID NO: 3537 - DNA, 16 bp, synthetic construct
  source 1..16: mol_type = other DNA
gtcctcgtgaatggca

SEQ ID NO: 3538 - DNA, 16 bp, synthetic construct
  source 1..16: mol_type = other DNA
tttgaaagcgtcatgc

SEQ ID NO: 3539 - DNA, 16 bp, synthetic construct
  source 1..16: mol_type = other DNA
aatttcgtatggtcag

SEQ ID NO: 3540 - DNA, 16 bp, synthetic construct
  source 1..16: mol_type = other DNA
cctgcaaacacaccga

SEQ ID NO: 3541 - DNA, 16 bp, synthetic construct
  source 1..16: mol_type = other DNA
ctgcaaacacaccgac

SEQ ID NO: 3542 - DNA, 16 bp, synthetic construct
  source 1..16: mol_type = other DNA
tgcaaacacaccgact

SEQ ID NO: 3543 - DNA, 16 bp, synthetic construct
  source 1..16: mol_type = other DNA
gcaaacacaccgactc

SEQ ID NO: 3544 - DNA, 16 bp, synthetic construct
  source 1..16: mol_type = other DNA
caaacacaccgactcc

SEQ ID NO: 3545 - DNA, 16 bp, synthetic construct
  source 1..16: mol_type = other DNA
aaacacaccgactccc

SEQ ID NO: 3546 - DNA, 16 bp, synthetic construct
  source 1..16: mol_type = other DNA
aacacaccgactccca

SEQ ID NO: 3547 - DNA, 16 bp, synthetic construct
  source 1..16: mol_type = other DNA
tttcgtatggtcagtc

SEQ ID NO: 3548 - DNA, 16 bp, synthetic construct
  source 1..16: mol_type = other DNA
acgcagtcttaagttc

SEQ ID NO: 3549 - DNA, 16 bp, synthetic construct
  source 1..16: mol_type = other DNA
cgcagtcttaagttct

SEQ ID NO: 3550 - DNA, 16 bp, synthetic construct
  source 1..16: mol_type = other DNA
tgctcactgcccgatg

SEQ ID NO: 3551 - DNA, 16 bp, synthetic construct
  source 1..16: mol_type = other DNA
cttaactacccacgag

SEQ ID NO: 3552 - DNA, 16 bp, synthetic construct
  source 1..16: mol_type = other DNA
cacctgggacaaaccg

SEQ ID NO: 3553 - DNA, 16 bp, synthetic construct
  source 1..16: mol_type = other DNA
acctgggacaaaccgc

SEQ ID NO: 3554 - DNA, 16 bp, synthetic construct
  source 1..16: mol_type = other DNA
cctgggacaaaccgct

SEQ ID NO: 3555 - DNA, 16 bp, synthetic construct
  source 1..16: mol_type = other DNA
ctgggacaaaccgctt

SEQ ID NO: 3556 - DNA, 16 bp, synthetic construct
  source 1..16: mol_type = other DNA
acagattagatgtacg

SEQ ID NO: 3557 - DNA, 16 bp, synthetic construct
  source 1..16: mol_type = other DNA
cagattagatgtacgc

SEQ ID NO: 3558 - DNA, 16 bp, synthetic construct
  source 1..16: mol_type = other DNA
tccgtattcttgtaag

SEQ ID NO: 3559 - DNA, 16 bp, synthetic construct
  source 1..16: mol_type = other DNA
ccgtattcttgtaagg

SEQ ID NO: 3560 - DNA, 16 bp, synthetic construct
  source 1..16: mol_type = other DNA
cgtattcttgtaagga

SEQ ID NO: 3561 - DNA, 16 bp, synthetic construct
  source 1..16: mol_type = other DNA
agtcaaagtcgaagtt

SEQ ID NO: 3562 - DNA, 16 bp, synthetic construct
  source 1..16: mol_type = other DNA
caaagtcgaagttggt

SEQ ID NO: 3563 - DNA, 16 bp, synthetic construct
  source 1..16: mol_type = other DNA
ttacgccagtgttcta

SEQ ID NO: 3564 - DNA, 16 bp, synthetic construct
  source 1..16: mol_type = other DNA
tacgccagtgttctaa

SEQ ID NO: 3565 - DNA, 16 bp, synthetic construct
  source 1..16: mol_type = other DNA
acgccagtgttctaaa

SEQ ID NO: 3566 - DNA, 16 bp, synthetic construct
  source 1..16: mol_type = other DNA
cgccagtgttctaaag

SEQ ID NO: 3567 - DNA, 16 bp, synthetic construct
  source 1..16: mol_type = other DNA
gcatgatattctacgg

SEQ ID NO: 3568 - DNA, 16 bp, synthetic construct
  source 1..16: mol_type = other DNA
catgatattctacggt

SEQ ID NO: 3569 - DNA, 16 bp, synthetic construct
  source 1..16: mol_type = other DNA
atgatattctacggtg

SEQ ID NO: 3570 - DNA, 16 bp, synthetic construct
  source 1..16: mol_type = other DNA
tgatattctacggtgt

SEQ ID NO: 3571 - DNA, 16 bp, synthetic construct
  source 1..16: mol_type = other DNA
gatattctacggtgta

SEQ ID NO: 3572 - DNA, 16 bp, synthetic construct
  source 1..16: mol_type = other DNA
caattctacgaaggtt

SEQ ID NO: 3573 - DNA, 16 bp, synthetic construct
  source 1..16: mol_type = other DNA
tggtcctagcagatcg

SEQ ID NO: 3574 - DNA, 16 bp, synthetic construct
  source 1..16: mol_type = other DNA
ggtcctagcagatcgg

SEQ ID NO: 3575 - DNA, 16 bp, synthetic construct
  source 1..16: mol_type = other DNA
cctagcagatcggaaa

SEQ ID NO: 3576 - DNA, 16 bp, synthetic construct
  source 1..16: mol_type = other DNA
cccttgcgagatacta

SEQ ID NO: 3577 - DNA, 16 bp, synthetic construct
  source 1..16: mol_type = other DNA
ccttgcgagatactac

SEQ ID NO: 3578 - DNA, 16 bp, synthetic construct
  source 1..16: mol_type = other DNA
agcatctacggaacac

SEQ ID NO: 3579 - DNA, 16 bp, synthetic construct
  source 1..16: mol_type = other DNA
gcatctacggaacaca

SEQ ID NO: 3580 - DNA, 16 bp, synthetic construct
  source 1..16: mol_type = other DNA
catctacggaacacag

SEQ ID NO: 3581 - DNA, 16 bp, synthetic construct
  source 1..16: mol_type = other DNA
atctacggaacacagc

SEQ ID NO: 3582 - DNA, 16 bp, synthetic construct
  source 1..16: mol_type = other DNA
tctacggaacacagct

SEQ ID NO: 3583 - DNA, 16 bp, synthetic construct
  source 1..16: mol_type = other DNA
ctacggaacacagcta

SEQ ID NO: 3584 - DNA, 16 bp, synthetic construct
  source 1..16: mol_type = other DNA
tacggaacacagctaa

SEQ ID NO: 3585 - DNA, 16 bp, synthetic construct
  source 1..16: mol_type = other DNA
atctagtctgggtccg

SEQ ID NO: 3586 - DNA, 16 bp, synthetic construct
  source 1..16: mol_type = other DNA
tctagtctgggtccgt

SEQ ID NO: 3587 - DNA, 16 bp, synthetic construct
  source 1..16: mol_type = other DNA
taacaagtcagattcg

SEQ ID NO: 3588 - DNA, 16 bp, synthetic construct
  source 1..16: mol_type = other DNA
aacaagtcagattcgt

SEQ ID NO: 3589 - DNA, 16 bp, synthetic construct
  source 1..16: mol_type = other DNA
agtcagattcgtcact

SEQ ID NO: 3590 - DNA, 16 bp, synthetic construct
  source 1..16: mol_type = other DNA
gtcagattcgtcactt

SEQ ID NO: 3591 - DNA, 16 bp, synthetic construct
  source 1..16: mol_type = other DNA
cagattcgtcacttgt

SEQ ID NO: 3592 - DNA, 16 bp, synthetic construct
  source 1..16: mol_type = other DNA
agattcgtcacttgtt

SEQ ID NO: 3593 - DNA, 16 bp, synthetic construct
  source 1..16: mol_type = other DNA
ctagtctgggtccgta

SEQ ID NO: 3594 - DNA, 16 bp, synthetic construct
  source 1..16: mol_type = other DNA
tctgggtccgtattta

SEQ ID NO: 3595 - DNA, 16 bp, synthetic construct
  source 1..16: mol_type = other DNA
ctgggtccgtatttat

SEQ ID NO: 3596 - DNA, 16 bp, synthetic construct
  source 1..16: mol_type = other DNA
tgggtccgtatttatc

SEQ ID NO: 3597 - DNA, 16 bp, synthetic construct
  source 1..16: mol_type = other DNA
gggtccgtatttatct

SEQ ID NO: 3598 - DNA, 16 bp, synthetic construct
  source 1..16: mol_type = other DNA
actcaggcttggcgaa

SEQ ID NO: 3599 - DNA, 16 bp, synthetic construct
  source 1..16: mol_type = other DNA
ctcaggcttggcgaat

SEQ ID NO: 3600 - DNA, 16 bp, synthetic construct
  source 1..16: mol_type = other DNA
tcaggcttggcgaatc

SEQ ID NO: 3601 - DNA, 16 bp, synthetic construct
  source 1..16: mol_type = other DNA
aaacataagtcgccta

SEQ ID NO: 3602 - DNA, 16 bp, synthetic construct
  source 1..16: mol_type = other DNA
atttcttcggtagagg

SEQ ID NO: 3603 - DNA, 16 bp, synthetic construct
  source 1..16: mol_type = other DNA
tttcttcggtagagga

SEQ ID NO: 3604 - DNA, 16 bp, synthetic construct
  source 1..16: mol_type = other DNA
atcgattactagggta

SEQ ID NO: 3605 - DNA, 16 bp, synthetic construct
  source 1..16: mol_type = other DNA
tcgattactagggtag

SEQ ID NO: 3606 - DNA, 16 bp, synthetic construct
  source 1..16: mol_type = other DNA
cgattactagggtaga

SEQ ID NO: 3607 - DNA, 16 bp, synthetic construct
  source 1..16: mol_type = other DNA
ccttccagacaaaccg

SEQ ID NO: 3608 - DNA, 16 bp, synthetic construct
  source 1..16: mol_type = other DNA
ccagacaaaccgaagc

SEQ ID NO: 3609 - DNA, 16 bp, synthetic construct
  source 1..16: mol_type = other DNA
aacatcagcgttaaac

SEQ ID NO: 3610 - DNA, 16 bp, synthetic construct
  source 1..16: mol_type = other DNA
acatcagcgttaaaca

SEQ ID NO: 3611 - DNA, 16 bp, synthetic construct
  source 1..16: mol_type = other DNA
catcagcgttaaacaa

SEQ ID NO: 3612 - DNA, 16 bp, synthetic construct
  source 1..16: mol_type = other DNA
atcagcgttaaacaac

SEQ ID NO: 3613 - DNA, 16 bp, synthetic construct
  source 1..16: mol_type = other DNA
tcagcgttaaacaaca

SEQ ID NO: 3614 - DNA, 16 bp, synthetic construct
  source 1..16: mol_type = other DNA
cacttaaaggctgcgt

SEQ ID NO: 3615 - DNA, 16 bp, synthetic construct
  source 1..16: mol_type = other DNA
acttaaaggctgcgta

SEQ ID NO: 3616 - DNA, 16 bp, synthetic construct
  source 1..16: mol_type = other DNA
cttaaaggctgcgtaa

SEQ ID NO: 3617 - DNA, 16 bp, synthetic construct
  source 1..16: mol_type = other DNA
ctggtagtaaatgccg

SEQ ID NO: 3618 - DNA, 16 bp, synthetic construct
  source 1..16: mol_type = other DNA
tggtagtaaatgccgt

SEQ ID NO: 3619 - DNA, 16 bp, synthetic construct
  source 1..16: mol_type = other DNA
ggtagtaaatgccgtg

SEQ ID NO: 3620 - DNA, 16 bp, synthetic construct
  source 1..16: mol_type = other DNA
gtagtaaatgccgtga

SEQ ID NO: 3621 - DNA, 16 bp, synthetic construct
  source 1..16: mol_type = other DNA
tagtaaatgccgtgac

SEQ ID NO: 3622 - DNA, 16 bp, synthetic construct
  source 1..16: mol_type = other DNA
cggtttctgagatata

SEQ ID NO: 3623 - DNA, 16 bp, synthetic construct
  source 1..16: mol_type = other DNA
taggcgtatctttctg

SEQ ID NO: 3624 - DNA, 16 bp, synthetic construct
  source 1..16: mol_type = other DNA
aggcgtatctttctgc

SEQ ID NO: 3625 - DNA, 16 bp, synthetic construct
  source 1..16: mol_type = other DNA
ggcgtatctttctgca

SEQ ID NO: 3626 - DNA, 16 bp, synthetic construct
  source 1..16: mol_type = other DNA
ggtgttgtccgcatgg

SEQ ID NO: 3627 - DNA, 16 bp, synthetic construct
  source 1..16: mol_type = other DNA
cagggtagattactcg

SEQ ID NO: 3628 - DNA, 16 bp, synthetic construct
  source 1..16: mol_type = other DNA
agggtagattactcgt

SEQ ID NO: 3629 - DNA, 16 bp, synthetic construct
  source 1..16: mol_type = other DNA
gggtagattactcgtt

SEQ ID NO: 3630 - DNA, 16 bp, synthetic construct
  source 1..16: mol_type = other DNA
ggtagattactcgttg

SEQ ID NO: 3631 - DNA, 16 bp, synthetic construct
  source 1..16: mol_type = other DNA
gtagattactcgttgt

SEQ ID NO: 3632 - DNA, 16 bp, synthetic construct
  source 1..16: mol_type = other DNA
tagattactcgttgtg

SEQ ID NO: 3633 - DNA, 16 bp, synthetic construct
  source 1..16: mol_type = other DNA
agattactcgttgtgc

SEQ ID NO: 3634 - DNA, 16 bp, synthetic construct
  source 1..16: mol_type = other DNA
gattactcgttgtgca

SEQ ID NO: 3635 - DNA, 16 bp, synthetic construct
  source 1..16: mol_type = other DNA
attactcgttgtgcat

SEQ ID NO: 3636 - DNA, 16 bp, synthetic construct
  source 1..16: mol_type = other DNA
actcgttgtgcatttg

SEQ ID NO: 3637 - DNA, 16 bp, synthetic construct
  source 1..16: mol_type = other DNA
acgattgtagaaagcc

SEQ ID NO: 3638 - DNA, 16 bp, synthetic construct
  source 1..16: mol_type = other DNA
cgattgtagaaagcca

SEQ ID NO: 3639 - DNA, 16 bp, synthetic construct
  source 1..16: mol_type = other DNA
ttattgggtgaaggcg

SEQ ID NO: 3640 - DNA, 16 bp, synthetic construct
  source 1..16: mol_type = other DNA
gcatcgagggcatgat

SEQ ID NO: 3641 - DNA, 16 bp, synthetic construct
  source 1..16: mol_type = other DNA
catcgagggcatgata

SEQ ID NO: 3642 - DNA, 16 bp, synthetic construct
  source 1..16: mol_type = other DNA
catatggacgatgcct

SEQ ID NO: 3643 - DNA, 16 bp, synthetic construct
  source 1..16: mol_type = other DNA
atatggacgatgcctg

SEQ ID NO: 3644 - DNA, 16 bp, synthetic construct
  source 1..16: mol_type = other DNA
tatggacgatgcctgt

SEQ ID NO: 3645 - DNA, 16 bp, synthetic construct
  source 1..16: mol_type = other DNA
atggacgatgcctgtc

SEQ ID NO: 3646 - DNA, 16 bp, synthetic construct
  source 1..16: mol_type = other DNA
agctcgtcacttccaa

SEQ ID NO: 3647 - DNA, 16 bp, synthetic construct
  source 1..16: mol_type = other DNA
acgtccagattgctgt

SEQ ID NO: 3648 - DNA, 16 bp, synthetic construct
  source 1..16: mol_type = other DNA
aggaccgtatgaacct

SEQ ID NO: 3649 - DNA, 16 bp, synthetic construct
  source 1..16: mol_type = other DNA
ggaccgtatgaacctg

SEQ ID NO: 3650 - DNA, 16 bp, synthetic construct
  source 1..16: mol_type = other DNA
gaccgtatgaacctga

SEQ ID NO: 3651 - DNA, 16 bp, synthetic construct
  source 1..16: mol_type = other DNA
accgtatgaacctgaa

SEQ ID NO: 3652 - DNA, 16 bp, synthetic construct
  source 1..16: mol_type = other DNA
ccgtatgaacctgaat

SEQ ID NO: 3653 - DNA, 16 bp, synthetic construct
  source 1..16: mol_type = other DNA
cgtatgaacctgaatc

SEQ ID NO: 3654 - DNA, 16 bp, synthetic construct
  source 1..16: mol_type = other DNA
aactgctaaacgtgac

SEQ ID NO: 3655 - DNA, 16 bp, synthetic construct
  source 1..16: mol_type = other DNA
actgctaaacgtgact

SEQ ID NO: 3656 - DNA, 16 bp, synthetic construct
  source 1..16: mol_type = other DNA
ctgctaaacgtgactc

SEQ ID NO: 3657 - DNA, 16 bp, synthetic construct
  source 1..16: mol_type = other DNA
tgctaaacgtgactcc

SEQ ID NO: 3658 - DNA, 16 bp, synthetic construct
  source 1..16: mol_type = other DNA
attgcttgtagtgacc

SEQ ID NO: 3659 - DNA, 16 bp, synthetic construct
  source 1..16: mol_type = other DNA
tcacagcccaattacc

SEQ ID NO: 3660 - DNA, 16 bp, synthetic construct
  source 1..16: mol_type = other DNA
gatgttgcagggctaa

SEQ ID NO: 3661 - DNA, 16 bp, synthetic construct
  source 1..16: mol_type = other DNA
tgttgcagggctaatc

SEQ ID NO: 3662 - DNA, 16 bp, synthetic construct
  source 1..16: mol_type = other DNA
gttgcagggctaatct

SEQ ID NO: 3663 - DNA, 16 bp, synthetic construct
  source 1..16: mol_type = other DNA
ttgcagggctaatctc

SEQ ID NO: 3664 - DNA, 16 bp, synthetic construct
  source 1..16: mol_type = other DNA
gcagggctaatctcac

SEQ ID NO: 3665 - DNA, 16 bp, synthetic construct
  source 1..16: mol_type = other DNA
aagctccctatgtatg

SEQ ID NO: 3666 - DNA, 16 bp, synthetic construct
  source 1..16: mol_type = other DNA
agctccctatgtatgg

SEQ ID NO: 3667 - DNA, 16 bp, synthetic construct
  source 1..16: mol_type = other DNA
ggccattacttatcca

SEQ ID NO: 3668 - DNA, 16 bp, synthetic construct
  source 1..16: mol_type = other DNA
gtatactcaatgggta

SEQ ID NO: 3669 - DNA, 16 bp, synthetic construct
  source 1..16: mol_type = other DNA
atactcaatgggtagc

SEQ ID NO: 3670 - DNA, 16 bp, synthetic construct
  source 1..16: mol_type = other DNA
ccattagtggtctgaa

SEQ ID NO: 3671 - DNA, 16 bp, synthetic construct
  source 1..16: mol_type = other DNA
tagctagtcttgagca

SEQ ID NO: 3672 - DNA, 16 bp, synthetic construct
  source 1..16: mol_type = other DNA
gctagtcttgagcagt

SEQ ID NO: 3673 - DNA, 16 bp, synthetic construct
  source 1..16: mol_type = other DNA
ggttatgcccatcaat

SEQ ID NO: 3674 - DNA, 16 bp, synthetic construct
  source 1..16: mol_type = other DNA
catatggactggacac

SEQ ID NO: 3675 - DNA, 16 bp, synthetic construct
  source 1..16: mol_type = other DNA
gggatactattgttac

SEQ ID NO: 3676 - DNA, 16 bp, synthetic construct
  source 1..16: mol_type = other DNA
caagctaagtctggtt

SEQ ID NO: 3677 - DNA, 16 bp, synthetic construct
  source 1..16: mol_type = other DNA
tgagggtaagctgatc

SEQ ID NO: 3678 - DNA, 16 bp, synthetic construct
  source 1..16: mol_type = other DNA
aacactcatactatcc

SEQ ID NO: 3679 - DNA, 16 bp, synthetic construct
  source 1..16: mol_type = other DNA
gttctaagactaactc

SEQ ID NO: 3680 - DNA, 16 bp, synthetic construct
  source 1..16: mol_type = other DNA
ggtggtggacattaac

SEQ ID NO: 3681 - DNA, 16 bp, synthetic construct
  source 1..16: mol_type = other DNA
gtcaatataagagacc

SEQ ID NO: 3682 - DNA, 16 bp, synthetic construct
  source 1..16: mol_type = other DNA
ccctggagctatatta

SEQ ID NO: 3683 - DNA, 16 bp, synthetic construct
  source 1..16: mol_type = other DNA
gagctatattaggagt

SEQ ID NO: 3684 - DNA, 16 bp, synthetic construct
  source 1..16: mol_type = other DNA
agctatattaggagtg

SEQ ID NO: 3685 - DNA, 16 bp, synthetic construct
  source 1..16: mol_type = other DNA
gctatattaggagtga

SEQ ID NO: 3686 - DNA, 16 bp, synthetic construct
  source 1..16: mol_type = other DNA
gcctagatagcacatg

SEQ ID NO: 3687 - DNA, 16 bp, synthetic construct
  source 1..16: mol_type = other DNA
tgtcacaaggtctagg

SEQ ID NO: 3688 - DNA, 16 bp, synthetic construct
  source 1..16: mol_type = other DNA
gcaatagacttgggca

SEQ ID NO: 3689 - DNA, 16 bp, synthetic construct
  source 1..16: mol_type = other DNA
gccataggtgtgctta

SEQ ID NO: 3690 - DNA, 16 bp, synthetic construct
  source 1..16: mol_type = other DNA
gtaggtctgttctaac

SEQ ID NO: 3691 - DNA, 16 bp, synthetic construct
  source 1..16: mol_type = other DNA
gtcctctagcaatggt

SEQ ID NO: 3692 - DNA, 16 bp, synthetic construct
  source 1..16: mol_type = other DNA
ctggtggatcttctac

SEQ ID NO: 3693 - DNA, 16 bp, synthetic construct
  source 1..16: mol_type = other DNA
ggtgcaactgttatgt

SEQ ID NO: 3694 - DNA, 16 bp, synthetic construct
  source 1..16: mol_type = other DNA
catgcagtaagggatc

SEQ ID NO: 3695 - DNA, 16 bp, synthetic construct
  source 1..16: mol_type = other DNA
gggctatcattagtaa

SEQ ID NO: 3696 - DNA, 16 bp, synthetic construct
  source 1..16: mol_type = other DNA
cttcaattggtgtgca

SEQ ID NO: 3697 - DNA, 16 bp, synthetic construct
  source 1..16: mol_type = other DNA
gggtaggtatactggt

SEQ ID NO: 3698 - DNA, 16 bp, synthetic construct
  source 1..16: mol_type = other DNA
ggtaggtatactggtc

SEQ ID NO: 3699 - DNA, 16 bp, synthetic construct
  source 1..16: mol_type = other DNA
ggtatactggtcaatg

SEQ ID NO: 3700 - DNA, 16 bp, synthetic construct
  source 1..16: mol_type = other DNA
gtatactggtcaatgg

SEQ ID NO: 3701 - DNA, 16 bp, synthetic construct
  source 1..16: mol_type = other DNA
gtcacaggctaacttc

SEQ ID NO: 3702 - DNA, 16 bp, synthetic construct
  source 1..16: mol_type = other DNA
tcaattggtgtgcaac

SEQ ID NO: 3703 - DNA, 16 bp, synthetic construct
  source 1..16: mol_type = other DNA
gttgaacagatggtac

SEQ ID NO: 3704 - DNA, 16 bp, synthetic construct
  source 1..16: mol_type = other DNA
caattggtgtgcaaca

SEQ ID NO: 3705 - DNA, 16 bp, synthetic construct
  source 1..16: mol_type = other DNA
tatccctccacataag

SEQ ID NO: 3706 - DNA, 16 bp, synthetic construct
  source 1..16: mol_type = other DNA
ggttcaatgttccatc

SEQ ID NO: 3707 - DNA, 16 bp, synthetic construct
  source 1..16: mol_type = other DNA
cctatatggacaatag

SEQ ID NO: 3708 - DNA, 16 bp, synthetic construct
  source 1..16: mol_type = other DNA
gaccaattcctgtcta

SEQ ID NO: 3709 - DNA, 16 bp, synthetic construct
  source 1..16: mol_type = other DNA
cccttagatcagaatc

SEQ ID NO: 3710 - DNA, 16 bp, synthetic construct
  source 1..16: mol_type = other DNA
tagcttaaccagtatg

SEQ ID NO: 3711 - DNA, 16 bp, synthetic construct
  source 1..16: mol_type = other DNA
gcttaaccagtatgtc

SEQ ID NO: 3712 - DNA, 16 bp, synthetic construct
  source 1..16: mol_type = other DNA
ggtgttccaaatgcac

SEQ ID NO: 3713 - DNA, 16 bp, synthetic construct
  source 1..16: mol_type = other DNA
ggcatggctctcttac

SEQ ID NO: 3714 - DNA, 16 bp, synthetic construct
  source 1..16: mol_type = other DNA
gggtgaactcaaatgc

SEQ ID NO: 3715 - DNA, 16 bp, synthetic construct
  source 1..16: mol_type = other DNA
aagctcaatcacctta

SEQ ID NO: 3716 - DNA, 16 bp, synthetic construct
  source 1..16: mol_type = other DNA
cactggtcagggttat

SEQ ID NO: 3717 - DNA, 16 bp, synthetic construct
  source 1..16: mol_type = other DNA
actggtcagggttata

SEQ ID NO: 3718 - DNA, 16 bp, synthetic construct
  source 1..16: mol_type = other DNA
tggtcagggttataag

SEQ ID NO: 3719 - DNA, 16 bp, synthetic construct
  source 1..16: mol_type = other DNA
gtcagggttataaggt

SEQ ID NO: 3720 - DNA, 16 bp, synthetic construct
  source 1..16: mol_type = other DNA
ttagattgattggcac

SEQ ID NO: 3721 - DNA, 16 bp, synthetic construct
  source 1..16: mol_type = other DNA
tcatcaatctagcaac

SEQ ID NO: 3722 - DNA, 16 bp, synthetic construct
  source 1..16: mol_type = other DNA
atcaatctagcaacac

SEQ ID NO: 3723 - DNA, 16 bp, synthetic construct
  source 1..16: mol_type = other DNA
gtatgacacctgttgt

SEQ ID NO: 3724 - DNA, 16 bp, synthetic construct
  source 1..16: mol_type = other DNA
cactacctacacacta

SEQ ID NO: 3725 - DNA, 16 bp, synthetic construct
  source 1..16: mol_type = other DNA
actacctacacactat

SEQ ID NO: 3726 - DNA, 16 bp, synthetic construct
  source 1..16: mol_type = other DNA
gacatagggagctatc

SEQ ID NO: 3727 - DNA, 16 bp, synthetic construct
  source 1..16: mol_type = other DNA
acatagggagctatct

SEQ ID NO: 3728 - DNA, 16 bp, synthetic construct
  source 1..16: mol_type = other DNA
agggagctatctatta

SEQ ID NO: 3729 - DNA, 16 bp, synthetic construct
  source 1..16: mol_type = other DNA
gggagctatctattac

SEQ ID NO: 3730 - DNA, 16 bp, synthetic construct
  source 1..16: mol_type = other DNA
ggagctatctattacc

SEQ ID NO: 3731 - DNA, 16 bp, synthetic construct
  source 1..16: mol_type = other DNA
gggataactcttatag

SEQ ID NO: 3732 - DNA, 16 bp, synthetic construct
  source 1..16: mol_type = other DNA
ggataactcttatagc

SEQ ID NO: 3733 - DNA, 16 bp, synthetic construct
  source 1..16: mol_type = other DNA
cacctaccatattgag

SEQ ID NO: 3734 - DNA, 16 bp, synthetic construct
  source 1..16: mol_type = other DNA
tggactatggtcaggt

SEQ ID NO: 3735 - DNA, 16 bp, synthetic construct
  source 1..16: mol_type = other DNA
ggactatggtcaggta

SEQ ID NO: 3736 - DNA, 16 bp, synthetic construct
  source 1..16: mol_type = other DNA
gactatggtcaggtaa

SEQ ID NO: 3737 - DNA, 16 bp, synthetic construct
  source 1..16: mol_type = other DNA
ttggttagggtattcc

SEQ ID NO: 3738 - DNA, 16 bp, synthetic construct
  source 1..16: mol_type = other DNA
taggttcaagtatcac

SEQ ID NO: 3739 - DNA, 16 bp, synthetic construct
  source 1..16: mol_type = other DNA
gtcagatcattgctag

SEQ ID NO: 3740 - DNA, 16 bp, synthetic construct
  source 1..16: mol_type = other DNA
agatcattgctagtac

SEQ ID NO: 3741 - DNA, 16 bp, synthetic construct
  source 1..16: mol_type = other DNA
gtacccaacttcctga

SEQ ID NO: 3742 - DNA, 16 bp, synthetic construct
  source 1..16: mol_type = other DNA
aggtggatcatacatc

SEQ ID NO: 3743 - DNA, 16 bp, synthetic construct
  source 1..16: mol_type = other DNA
gatcatacatccaact

SEQ ID NO: 3744 - DNA, 16 bp, synthetic construct
  source 1..16: mol_type = other DNA
ggtgttgtacccttgt

SEQ ID NO: 3745 - DNA, 16 bp, synthetic construct
  source 1..16: mol_type = other DNA
gtgttgtacccttgtg

SEQ ID NO: 3746 - DNA, 16 bp, synthetic construct
  source 1..16: mol_type = other DNA
gaccagcacccttaag

SEQ ID NO: 3747 - DNA, 16 bp, synthetic construct
  source 1..16: mol_type = other DNA
cagtagattgttagac

SEQ ID NO: 3748 - DNA, 16 bp, synthetic construct
  source 1..16: mol_type = other DNA
agtagattgttagacc

SEQ ID NO: 3749 - DNA, 16 bp, synthetic construct
  source 1..16: mol_type = other DNA
gcaactcaatactctc

SEQ ID NO: 3750 - DNA, 16 bp, synthetic construct
  source 1..16: mol_type = other DNA
ctggtcatgggcatac

SEQ ID NO: 3751 - DNA, 16 bp, synthetic construct
  source 1..16: mol_type = other DNA
gtagattgttagaccc

SEQ ID NO: 3752 - DNA, 16 bp, synthetic construct
  source 1..16: mol_type = other DNA
gctctcatagggtata

SEQ ID NO: 3753 - DNA, 16 bp, synthetic construct
  source 1..16: mol_type = other DNA
gtgatccagcttgcaa

SEQ ID NO: 3754 - DNA, 16 bp, synthetic construct
  source 1..16: mol_type = other DNA
gatccagcttgcaata

SEQ ID NO: 3755 - DNA, 16 bp, synthetic construct
  source 1..16: mol_type = other DNA
ctctcatagggtatag

SEQ ID NO: 3756 - DNA, 16 bp, synthetic construct
  source 1..16: mol_type = other DNA
gtaggataactcagac

SEQ ID NO: 3757 - DNA, 16 bp, synthetic construct
  source 1..16: mol_type = other DNA
gactatacaagtaggt

SEQ ID NO: 3758 - DNA, 16 bp, synthetic construct
  source 1..16: mol_type = other DNA
ctatacaagtaggtgc

SEQ ID NO: 3759 - DNA, 16 bp, synthetic construct
  source 1..16: mol_type = other DNA
atacaagtaggtgctc

SEQ ID NO: 3760 - DNA, 16 bp, synthetic construct
  source 1..16: mol_type = other DNA
gcctctcccaagttag

SEQ ID NO: 3761 - DNA, 16 bp, synthetic construct
  source 1..16: mol_type = other DNA
gtcactccaacttgat

SEQ ID NO: 3762 - DNA, 16 bp, synthetic construct
  source 1..16: mol_type = other DNA
gtggtgtgcttagtcc

SEQ ID NO: 3763 - DNA, 16 bp, synthetic construct
  source 1..16: mol_type = other DNA
ccttgaggttgtccac

SEQ ID NO: 3764 - DNA, 16 bp, synthetic construct
  source 1..16: mol_type = other DNA
gtcctgtgcaattagt

SEQ ID NO: 3765 - DNA, 16 bp, synthetic construct
  source 1..16: mol_type = other DNA
tcctgtgcaattagtc

SEQ ID NO: 3766 - DNA, 16 bp, synthetic construct
  source 1..16: mol_type = other DNA
cctgtgcaattagtcc

SEQ ID NO: 3767 - DNA, 16 bp, synthetic construct
  source 1..16: mol_type = other DNA
ctgtgcaattagtccc

SEQ ID NO: 3768 - DNA, 16 bp, synthetic construct
  source 1..16: mol_type = other DNA
taacacttgatctgac

SEQ ID NO: 3769 - DNA, 16 bp, synthetic construct
  source 1..16: mol_type = other DNA
atctgaccaccaacta

SEQ ID NO: 3770 - DNA, 16 bp, synthetic construct
  source 1..16: mol_type = other DNA
ctgaccaccaactaac

SEQ ID NO: 3771 - DNA, 16 bp, synthetic construct
  source 1..16: mol_type = other DNA
tgaccaccaactaaca

SEQ ID NO: 3772 - DNA, 16 bp, synthetic construct
  source 1..16: mol_type = other DNA
caccaactaacaatag

SEQ ID NO: 3773 - DNA, 16 bp, synthetic construct
  source 1..16: mol_type = other DNA
ccaactaacaataggg

SEQ ID NO: 3774 - DNA, 16 bp, synthetic construct
  source 1..16: mol_type = other DNA
gtaatagtctaactgc

SEQ ID NO: 3775 - DNA, 16 bp, synthetic construct
  source 1..16: mol_type = other DNA
aatagtctaactgcac

SEQ ID NO: 3776 - DNA, 16 bp, synthetic construct
  source 1..16: mol_type = other DNA
atagtctaactgcaca

SEQ ID NO: 3777 - DNA, 16 bp, synthetic construct
  source 1..16: mol_type = other DNA
ggccctagtgtcatac

SEQ ID NO: 3778 - DNA, 16 bp, synthetic construct
  source 1..16: mol_type = other DNA
gccctagtgtcatacc

SEQ ID NO: 3779 - DNA, 16 bp, synthetic construct
  source 1..16: mol_type = other DNA
ccctagtgtcatacca

SEQ ID NO: 3780 - DNA, 16 bp, synthetic construct
  source 1..16: mol_type = other DNA
cctagtgtcataccat

SEQ ID NO: 3781 - DNA, 16 bp, synthetic construct
  source 1..16: mol_type = other DNA
gaggtgactgactagc

SEQ ID NO: 3782 - DNA, 16 bp, synthetic construct
  source 1..16: mol_type = other DNA
caggctgctacattac

SEQ ID NO: 3783 - DNA, 16 bp, synthetic construct
  source 1..16: mol_type = other DNA
gctgctacattaccta

SEQ ID NO: 3784 - DNA, 16 bp, synthetic construct
  source 1..16: mol_type = other DNA
gctacattacctaaac

SEQ ID NO: 3785 - DNA, 16 bp, synthetic construct
  source 1..16: mol_type = other DNA
ctaactgaggtgtgac

SEQ ID NO: 3786 - DNA, 16 bp, synthetic construct
  source 1..16: mol_type = other DNA
ggttaccactcaagat

SEQ ID NO: 3787 - DNA, 16 bp, synthetic construct
  source 1..16: mol_type = other DNA
taactcacccaatagc

SEQ ID NO: 3788 - DNA, 16 bp, synthetic construct
  source 1..16: mol_type = other DNA
aactcacccaatagcc

SEQ ID NO: 3789 - DNA, 16 bp, synthetic construct
  source 1..16: mol_type = other DNA
gaccctaattcagcac

SEQ ID NO: 3790 - DNA, 16 bp, synthetic construct
  source 1..16: mol_type = other DNA
gtgtggtgcagctaat

SEQ ID NO: 3791 - DNA, 16 bp, synthetic construct
  source 1..16: mol_type = other DNA
tgtggtgcagctaatc

SEQ ID NO: 3792 - DNA, 16 bp, synthetic construct
  source 1..16: mol_type = other DNA
gtggtgcagctaatca

SEQ ID NO: 3793 - DNA, 16 bp, synthetic construct
  source 1..16: mol_type = other DNA
ggctattgctcatgtc

SEQ ID NO: 3794 - DNA, 16 bp, synthetic construct
  source 1..16: mol_type = other DNA
caatccagttatgtac

SEQ ID NO: 3795 - DNA, 16 bp, synthetic construct
  source 1..16: mol_type = other DNA
ggtattgtcctacttg

SEQ ID NO: 3796 - DNA, 16 bp, synthetic construct
  source 1..16: mol_type = other DNA
gttgttatgacaggac

SEQ ID NO: 3797 - DNA, 16 bp, synthetic construct
  source 1..16: mol_type = other DNA
gttatgacaggactgg

SEQ ID NO: 3798 - DNA, 16 bp, synthetic construct
  source 1..16: mol_type = other DNA
tatgacaggactggta

SEQ ID NO: 3799 - DNA, 16 bp, synthetic construct
  source 1..16: mol_type = other DNA
ccctttacaacagacc

SEQ ID NO: 3800 - DNA, 16 bp, synthetic construct
  source 1..16: mol_type = other DNA
gatgggtgattcctag

SEQ ID NO: 3801 - DNA, 16 bp, synthetic construct
  source 1..16: mol_type = other DNA
taccaaacctactatg

SEQ ID NO: 3802 - DNA, 16 bp, synthetic construct
  source 1..16: mol_type = other DNA
gagggtatgttaatcc

SEQ ID NO: 3803 - DNA, 16 bp, synthetic construct
  source 1..16: mol_type = other DNA
taaggtgcataagttg

SEQ ID NO: 3804 - DNA, 16 bp, synthetic construct
  source 1..16: mol_type = other DNA
accaactatcaccaac

SEQ ID NO: 3805 - DNA, 16 bp, synthetic construct
  source 1..16: mol_type = other DNA
ctatcaccaaccaatc

SEQ ID NO: 3806 - DNA, 16 bp, synthetic construct
  source 1..16: mol_type = other DNA
accaatctgtcccaat

SEQ ID NO: 3807 - DNA, 16 bp, synthetic construct
  source 1..16: mol_type = other DNA
actgactatatggagc

SEQ ID NO: 3808 - DNA, 16 bp, synthetic construct
  source 1..16: mol_type = other DNA
gagccagatgatacac

SEQ ID NO: 3809 - DNA, 16 bp, synthetic construct
  source 1..16: mol_type = other DNA
gccagatgatacacac

SEQ ID NO: 3810 - DNA, 16 bp, synthetic construct
  source 1..16: mol_type = other DNA
gtgacaggattggtac

SEQ ID NO: 3811 - DNA, 16 bp, synthetic construct
  source 1..16: mol_type = other DNA
gggcactttagggtat

SEQ ID NO: 3812 - DNA, 16 bp, synthetic construct
  source 1..16: mol_type = other DNA
ggcactttagggtatc

SEQ ID NO: 3813 - DNA, 16 bp, synthetic construct
  source 1..16: mol_type = other DNA
attagatcataccagc

SEQ ID NO: 3814 - DNA, 16 bp, synthetic construct
  source 1..16: mol_type = other DNA
ttagatcataccagcc

SEQ ID NO: 3815 - DNA, 16 bp, synthetic construct
  source 1..16: mol_type = other DNA
gcactttagggtatct

SEQ ID NO: 3816 - DNA, 16 bp, synthetic construct
  source 1..16: mol_type = other DNA
cacctaatggactgca

SEQ ID NO: 3817 - DNA, 16 bp, synthetic construct
  source 1..16: mol_type = other DNA
acaaacccaatagacc

SEQ ID NO: 3818 - DNA, 16 bp, synthetic construct
  source 1..16: mol_type = other DNA
caaacccaatagacct

SEQ ID NO: 3819 - DNA, 16 bp, synthetic construct
  source 1..16: mol_type = other DNA
aacccaatagacctta

SEQ ID NO: 3820 - DNA, 16 bp, synthetic construct
  source 1..16: mol_type = other DNA
acccaatagaccttac

SEQ ID NO: 3821 - DNA, 16 bp, synthetic construct
  source 1..16: mol_type = other DNA
cccaatagaccttaca

SEQ ID NO: 3822 - DNA, 16 bp, synthetic construct
  source 1..16: mol_type = other DNA
ccaatagaccttacac

SEQ ID NO: 3823 - DNA, 16 bp, synthetic construct
  source 1..16: mol_type = other DNA
atagaccttacacaag

SEQ ID NO: 3824 - DNA, 16 bp, synthetic construct
  source 1..16: mol_type = other DNA
catagagttgaagcac

SEQ ID NO: 3825 - DNA, 16 bp, synthetic construct
  source 1..16: mol_type = other DNA
caatcagcaagggtat

SEQ ID NO: 3826 - DNA, 16 bp, synthetic construct
  source 1..16: mol_type = other DNA
ggttaatagaagccta

SEQ ID NO: 3827 - DNA, 16 bp, synthetic construct
  source 1..16: mol_type = other DNA
gtatacctaaagccca

SEQ ID NO: 3828 - DNA, 16 bp, synthetic construct
  source 1..16: mol_type = other DNA
tatacctaaagcccac

SEQ ID NO: 3829 - DNA, 16 bp, synthetic construct
  source 1..16: mol_type = other DNA
gttatatggtctgggc

SEQ ID NO: 3830 - DNA, 16 bp, synthetic construct
  source 1..16: mol_type = other DNA
tgtattgaaccctagc

SEQ ID NO: 3831 - DNA, 16 bp, synthetic construct
  source 1..16: mol_type = other DNA
tttggtactctacaac

SEQ ID NO: 3832 - DNA, 16 bp, synthetic construct
  source 1..16: mol_type = other DNA
gactaccacaattcat

SEQ ID NO: 3833 - DNA, 16 bp, synthetic construct
  source 1..16: mol_type = other DNA
ggtctgttacccattg

SEQ ID NO: 3834 - DNA, 16 bp, synthetic construct
  source 1..16: mol_type = other DNA
ccagctcattaggcac

SEQ ID NO: 3835 - DNA, 16 bp, synthetic construct
  source 1..16: mol_type = other DNA
agctcattaggcacac

SEQ ID NO: 3836 - DNA, 16 bp, synthetic construct
  source 1..16: mol_type = other DNA
gctcattaggcacact

SEQ ID NO: 3837 - DNA, 16 bp, synthetic construct
  source 1..16: mol_type = other DNA
cagggagccttaacta

SEQ ID NO: 3838 - DNA, 16 bp, synthetic construct
  source 1..16: mol_type = other DNA
agggagccttaactac

SEQ ID NO: 3839 - DNA, 16 bp, synthetic construct
  source 1..16: mol_type = other DNA
ctcaagattgactaac

SEQ ID NO: 3840 - DNA, 16 bp, synthetic construct
  source 1..16: mol_type = other DNA
ggacctccatacacat

SEQ ID NO: 3841 - DNA, 16 bp, synthetic construct
  source 1..16: mol_type = other DNA
ctgatctgaacaaccc

SEQ ID NO: 3842 - DNA, 16 bp, synthetic construct
  source 1..16: mol_type = other DNA
gtcaaactaaggttgt

SEQ ID NO: 3843 - DNA, 16 bp, synthetic construct
  source 1..16: mol_type = other DNA
actaaggttgtaaggc

SEQ ID NO: 3844 - DNA, 16 bp, synthetic construct
  source 1..16: mol_type = other DNA
ctaaggttgtaaggca

SEQ ID NO: 3845 - DNA, 16 bp, synthetic construct
  source 1..16: mol_type = other DNA
actgtatagtgtaacc

SEQ ID NO: 3846 - DNA, 16 bp, synthetic construct
  source 1..16: mol_type = other DNA
atatctagtctgggtc

SEQ ID NO: 3847 - DNA, 16 bp, synthetic construct
  source 1..16: mol_type = other DNA
tatctagtctgggtcc

SEQ ID NO: 3848 - DNA, 16 bp, synthetic construct
  source 1..16: mol_type = other DNA
ttactagggtagatgc

SEQ ID NO: 3849 - DNA, 16 bp, synthetic construct
  source 1..16: mol_type = other DNA
gtattgctaccttaca

SEQ ID NO: 3850 - DNA, 16 bp, synthetic construct
  source 1..16: mol_type = other DNA
gctaccttacaaagac

SEQ ID NO: 3851 - DNA, 16 bp, synthetic construct
  source 1..16: mol_type = other DNA
tcagtctaagtgtagc

SEQ ID NO: 3852 - DNA, 16 bp, synthetic construct
  source 1..16: mol_type = other DNA
cagtctaagtgtagca

SEQ ID NO: 3853 - DNA, 16 bp, synthetic construct
  source 1..16: mol_type = other DNA
agtctaagtgtagcac

SEQ ID NO: 3854 - DNA, 16 bp, synthetic construct
  source 1..16: mol_type = other DNA
gtctaagtgtagcacc

SEQ ID NO: 3855 - DNA, 16 bp, synthetic construct
  source 1..16: mol_type = other DNA
gtagcaccttatgtat

SEQ ID NO: 3856 - DNA, 16 bp, synthetic construct
  source 1..16: mol_type = other DNA
tctatgggctacaaca

SEQ ID NO: 3857 - DNA, 16 bp, synthetic construct
  source 1..16: mol_type = other DNA
ctatgggctacaacat

SEQ ID NO: 3858 - DNA, 16 bp, synthetic construct
  source 1..16: mol_type = other DNA
caactaaacccacatc

SEQ ID NO: 3859 - DNA, 16 bp, synthetic construct
  source 1..16: mol_type = other DNA
aattgtagttagccca

SEQ ID NO: 3860 - DNA, 16 bp, synthetic construct
  source 1..16: mol_type = other DNA
gtagttagcccatatc

SEQ ID NO: 3861 - DNA, 16 bp, synthetic construct
  source 1..16: mol_type = other DNA
tagttagcccatatcc

SEQ ID NO: 3862 - DNA, 16 bp, synthetic construct
  source 1..16: mol_type = other DNA
agttagcccatatcca

SEQ ID NO: 3863 - DNA, 16 bp, synthetic construct
  source 1..16: mol_type = other DNA
tcagggtagattactc

SEQ ID NO: 3864 - DNA, 16 bp, synthetic construct
  source 1..16: mol_type = other DNA
taaaggactaacaccc

SEQ ID NO: 3865 - DNA, 16 bp, synthetic construct
  source 1..16: mol_type = other DNA
cagatgctagggctaa

SEQ ID NO: 3866 - DNA, 16 bp, synthetic construct
  source 1..16: mol_type = other DNA
acaagccaagtcccac

SEQ ID NO: 3867 - DNA, 16 bp, synthetic construct
  source 1..16: mol_type = other DNA
ctggtctgctacaatg

SEQ ID NO: 3868 - DNA, 16 bp, synthetic construct
  source 1..16: mol_type = other DNA
ggtctgctacaatgat

SEQ ID NO: 3869 - DNA, 16 bp, synthetic construct
  source 1..16: mol_type = other DNA
gtctgctacaatgatc

SEQ ID NO: 3870 - DNA, 16 bp, synthetic construct
  source 1..16: mol_type = other DNA
tctgctacaatgatcc

SEQ ID NO: 3871 - DNA, 16 bp, synthetic construct
  source 1..16: mol_type = other DNA
aattgcaagtagaccc

SEQ ID NO: 3872 - DNA, 16 bp, synthetic construct
  source 1..16: mol_type = other DNA
attgcaagtagaccca

SEQ ID NO: 3873 - DNA, 16 bp, synthetic construct
  source 1..16: mol_type = other DNA
taggaactgtttagcc

SEQ ID NO: 3874 - DNA, 16 bp, synthetic construct
  source 1..16: mol_type = other DNA
tgggtctaagataggc

SEQ ID NO: 3875 - DNA, 16 bp, synthetic construct
  source 1..16: mol_type = other DNA
ctcaaactaggtagca

SEQ ID NO: 3876 - DNA, 16 bp, synthetic construct
  source 1..16: mol_type = other DNA
tcaaactaggtagcac

SEQ ID NO: 3877 - DNA, 16 bp, synthetic construct
  source 1..16: mol_type = other DNA
caaactaggtagcact

SEQ ID NO: 3878 - DNA, 16 bp, synthetic construct
  source 1..16: mol_type = other DNA
aaactaggtagcactc

SEQ ID NO: 3879 - DNA, 16 bp, synthetic construct
  source 1..16: mol_type = other DNA
gtagcactccctcata

SEQ ID NO: 3880 - DNA, 16 bp, synthetic construct
  source 1..16: mol_type = other DNA
tagcactccctcatag

SEQ ID NO: 3881 - DNA, 16 bp, synthetic construct
  source 1..16: mol_type = other DNA
agcactccctcatagc

SEQ ID NO: 3882 - DNA, 16 bp, synthetic construct
  source 1..16: mol_type = other DNA
cacttcatgggtctag

SEQ ID NO: 3883 - DNA, 16 bp, synthetic construct
  source 1..16: mol_type = other DNA
gtatgaacctgaatcc

SEQ ID NO: 3884 - DNA, 16 bp, synthetic construct
  source 1..16: mol_type = other DNA
gccgtagagagcaacc

SEQ ID NO: 3885 - DNA, 16 bp, synthetic construct
  source 1..16: mol_type = other DNA
ccgtagagagcaacca

SEQ ID NO: 3886 - DNA, 16 bp, synthetic construct
  source 1..16: mol_type = other DNA
tcggtcagatggaaac

SEQ ID NO: 3887 - DNA, 16 bp, synthetic construct
  source 1..16: mol_type = other DNA
gccacaagagaccacg

SEQ ID NO: 3888 - DNA, 16 bp, synthetic construct
  source 1..16: mol_type = other DNA
ccacaagagaccacga

SEQ ID NO: 3889 - DNA, 16 bp, synthetic construct
  source 1..16: mol_type = other DNA
acgttccatgtagttc

SEQ ID NO: 3890 - DNA, 16 bp, synthetic construct
  source 1..16: mol_type = other DNA
catgtagttccgtgga

SEQ ID NO: 3891 - DNA, 16 bp, synthetic construct
  source 1..16: mol_type = other DNA
atgtagttccgtggat

SEQ ID NO: 3892 - DNA, 16 bp, synthetic construct
  source 1..16: mol_type = other DNA
tgtagttccgtggatg

SEQ ID NO: 3893 - DNA, 16 bp, synthetic construct
  source 1..16: mol_type = other DNA
gtagttccgtggatgc

SEQ ID NO: 3894 - DNA, 16 bp, synthetic construct
  source 1..16: mol_type = other DNA
tagttccgtggatgcc

SEQ ID NO: 3895 - DNA, 16 bp, synthetic construct
  source 1..16: mol_type = other DNA
agttccgtggatgccc

SEQ ID NO: 3896 - DNA, 16 bp, synthetic construct
  source 1..16: mol_type = other DNA
ggttccaccagacgat

SEQ ID NO: 3897 - DNA, 16 bp, synthetic construct
  source 1..16: mol_type = other DNA
accagacgatgccaga

SEQ ID NO: 3898 - DNA, 16 bp, synthetic construct
  source 1..16: mol_type = other DNA
ccagacgatgccagaa

SEQ ID NO: 3899 - DNA, 16 bp, synthetic construct
  source 1..16: mol_type = other DNA
cagacgatgccagaat

SEQ ID NO: 3900 - DNA, 16 bp, synthetic construct
  source 1..16: mol_type = other DNA
gacgatgccagaatat

SEQ ID NO: 3901 - DNA, 16 bp, synthetic construct
  source 1..16: mol_type = other DNA
acgatgccagaatatc

SEQ ID NO: 3902 - DNA, 16 bp, synthetic construct
  source 1..16: mol_type = other DNA
cgatgccagaatatct

SEQ ID NO: 3903 - DNA, 16 bp, synthetic construct
  source 1..16: mol_type = other DNA
gcgtctctgctgattg

SEQ ID NO: 3904 - DNA, 16 bp, synthetic construct
  source 1..16: mol_type = other DNA
cgtgagtgtccagaga

SEQ ID NO: 3905 - DNA, 16 bp, synthetic construct
  source 1..16: mol_type = other DNA
gtcccgtagcacctaa

SEQ ID NO: 3906 - DNA, 16 bp, synthetic construct
  source 1..16: mol_type = other DNA
tcccgtagcacctaaa

SEQ ID NO: 3907 - DNA, 16 bp, synthetic construct
  source 1..16: mol_type = other DNA
cccgtagcacctaaat

SEQ ID NO: 3908 - DNA, 16 bp, synthetic construct
  source 1..16: mol_type = other DNA
ccgtagcacctaaata

SEQ ID NO: 3909 - DNA, 16 bp, synthetic construct
  source 1..16: mol_type = other DNA
cgtagcacctaaataa

SEQ ID NO: 3910 - DNA, 16 bp, synthetic construct
  source 1..16: mol_type = other DNA
gatgcccacctcgtca

SEQ ID NO: 3911 - DNA, 16 bp, synthetic construct
  source 1..16: mol_type = other DNA
agcttctgtccgtgga

SEQ ID NO: 3912 - DNA, 16 bp, synthetic construct
  source 1..16: mol_type = other DNA
cttctgtccgtggagg

SEQ ID NO: 3913 - DNA, 16 bp, synthetic construct
  source 1..16: mol_type = other DNA
gtccgtggaggtggtt

SEQ ID NO: 3914 - DNA, 16 bp, synthetic construct
  source 1..16: mol_type = other DNA
ccgtggaggtggttga

SEQ ID NO: 3915 - DNA, 16 bp, synthetic construct
  source 1..16: mol_type = other DNA
tggaatggattcagcg

SEQ ID NO: 3916 - DNA, 16 bp, synthetic construct
  source 1..16: mol_type = other DNA
ggaatggattcagcgt

SEQ ID NO: 3917 - DNA, 16 bp, synthetic construct
  source 1..16: mol_type = other DNA
gaatggattcagcgtg

SEQ ID NO: 3918 - DNA, 16 bp, synthetic construct
  source 1..16: mol_type = other DNA
aatggattcagcgtgc

SEQ ID NO: 3919 - DNA, 16 bp, synthetic construct
  source 1..16: mol_type = other DNA
atggattcagcgtgct

SEQ ID NO: 3920 - DNA, 16 bp, synthetic construct
  source 1..16: mol_type = other DNA
gtgatgtggactaaac

SEQ ID NO: 3921 - DNA, 16 bp, synthetic construct
  source 1..16: mol_type = other DNA
agtgtaccatcaggag

SEQ ID NO: 3922 - DNA, 16 bp, synthetic construct
  source 1..16: mol_type = other DNA
acaagacaccaaccta

SEQ ID NO: 3923 - DNA, 16 bp, synthetic construct
  source 1..16: mol_type = other DNA
caagacaccaacctac

SEQ ID NO: 3924 - DNA, 16 bp, synthetic construct
  source 1..16: mol_type = other DNA
aagacaccaacctacg

SEQ ID NO: 3925 - DNA, 16 bp, synthetic construct
  source 1..16: mol_type = other DNA
agacaccaacctacgg

SEQ ID NO: 3926 - DNA, 16 bp, synthetic construct
  source 1..16: mol_type = other DNA
gacaccaacctacgga

SEQ ID NO: 3927 - DNA, 16 bp, synthetic construct
  source 1..16: mol_type = other DNA
acaccaacctacggac

SEQ ID NO: 3928 - DNA, 16 bp, synthetic construct
  source 1..16: mol_type = other DNA
caccaacctacggact

SEQ ID NO: 3929 - DNA, 16 bp, synthetic construct
  source 1..16: mol_type = other DNA
accaacctacggactc

SEQ ID NO: 3930 - DNA, 16 bp, synthetic construct
  source 1..16: mol_type = other DNA
atgcgggacaatttgg

SEQ ID NO: 3931 - DNA, 16 bp, synthetic construct
  source 1..16: mol_type = other DNA
tgcgggacaatttgga

SEQ ID NO: 3932 - DNA, 16 bp, synthetic construct
  source 1..16: mol_type = other DNA
cgggacaatttggaac

SEQ ID NO: 3933 - DNA, 16 bp, synthetic construct
  source 1..16: mol_type = other DNA
ccaatggacagctcgt

SEQ ID NO: 3934 - DNA, 16 bp, synthetic construct
  source 1..16: mol_type = other DNA
caatggacagctcgtg

SEQ ID NO: 3935 - DNA, 16 bp, synthetic construct
  source 1..16: mol_type = other DNA
cgtgagactttgcatg

SEQ ID NO: 3936 - DNA, 16 bp, synthetic construct
  source 1..16: mol_type = other DNA
atcgtgtattaccatc

SEQ ID NO: 3937 - DNA, 16 bp, synthetic construct
  source 1..16: mol_type = other DNA
tcgtgtattaccatca

SEQ ID NO: 3938 - DNA, 16 bp, synthetic construct
  source 1..16: mol_type = other DNA
cgtgtattaccatcat

SEQ ID NO: 3939 - DNA, 16 bp, synthetic construct
  source 1..16: mol_type = other DNA
tccgaagtatctcact

SEQ ID NO: 3940 - DNA, 16 bp, synthetic construct
  source 1..16: mol_type = other DNA
ccgaagtatctcactc

SEQ ID NO: 3941 - DNA, 16 bp, synthetic construct
  source 1..16: mol_type = other DNA
catcctcagcaattcg

SEQ ID NO: 3942 - DNA, 16 bp, synthetic construct
  source 1..16: mol_type = other DNA
gcccttctaacacagt

SEQ ID NO: 3943 - DNA, 16 bp, synthetic construct
  source 1..16: mol_type = other DNA
ccggagtctgccttca

SEQ ID NO: 3944 - DNA, 16 bp, synthetic construct
  source 1..16: mol_type = other DNA
ccagcaacactctagc

SEQ ID NO: 3945 - DNA, 16 bp, synthetic construct
  source 1..16: mol_type = other DNA
ggccctgtagttgatc

SEQ ID NO: 3946 - DNA, 16 bp, synthetic construct
  source 1..16: mol_type = other DNA
gccctgtagttgatcc

SEQ ID NO: 3947 - DNA, 16 bp, synthetic construct
  source 1..16: mol_type = other DNA
gtagtagtgagaccat

SEQ ID NO: 3948 - DNA, 20 bp, synthetic construct
  source 1..20: mol_type = other DNA
ataggcaggtggcagaactt

SEQ ID NO: 3949 - DNA, 20 bp, synthetic construct
  source 1..20: mol_type = other DNA
taggcaggtggcagaacttc

SEQ ID NO: 3950 - DNA, 20 bp, synthetic construct
  source 1..20: mol_type = other DNA
ggctgcattcatctcaaggg

SEQ ID NO: 3951 - DNA, 20 bp, synthetic construct
  source 1..20: mol_type = other DNA
gctgcattcatctcaagggc

SEQ ID NO: 3952 - DNA, 20 bp, synthetic construct
  source 1..20: mol_type = other DNA
ctgcattcatctcaagggca

SEQ ID NO: 3953 - DNA, 20 bp, synthetic construct
  source 1..20: mol_type = other DNA
tgcattcatctcaagggcat

SEQ ID NO: 3954 - DNA, 20 bp, synthetic construct
  source 1..20: mol_type = other DNA
gcattcatctcaagggcatt

SEQ ID NO: 3955 - DNA, 20 bp, synthetic construct
  source 1..20: mol_type = other DNA
cattcatctcaagggcattt

SEQ ID NO: 3956 - DNA, 20 bp, synthetic construct
  source 1..20: mol_type = other DNA
attcatctcaagggcatttg

SEQ ID NO: 3957 - DNA, 20 bp, synthetic construct
  source 1..20: mol_type = other DNA
ttcatctcaagggcatttgc

SEQ ID NO: 3958 - DNA, 20 bp, synthetic construct
  source 1..20: mol_type = other DNA
tagtgagttgttatcatgcc

SEQ ID NO: 3959 - DNA, 20 bp, synthetic construct
  source 1..20: mol_type = other DNA
tgagttgttatcatgccacc

SEQ ID NO: 3960 - DNA, 20 bp, synthetic construct
  source 1..20: mol_type = other DNA
gctgcttagtgggtacaagg

SEQ ID NO: 3961 - DNA, 20 bp, synthetic construct
  source 1..20: mol_type = other DNA
ctgcttagtgggtacaagga

SEQ ID NO: 3962 - DNA, 20 bp, synthetic construct
  source 1..20: mol_type = other DNA
tgcttagtgggtacaaggat

SEQ ID NO: 3963 - DNA, 20 bp, synthetic construct
  source 1..20: mol_type = other DNA
gcttagtgggtacaaggatt

SEQ ID NO: 3964 - DNA, 20 bp, synthetic construct
  source 1..20: mol_type = other DNA
cttagtgggtacaaggattc

SEQ ID NO: 3965 - DNA, 20 bp, synthetic construct
  source 1..20: mol_type = other DNA
ttagtgggtacaaggattct

SEQ ID NO: 3966 - DNA, 20 bp, synthetic construct
  source 1..20: mol_type = other DNA
tagtgggtacaaggattcta

SEQ ID NO: 3967 - DNA, 20 bp, synthetic construct
  source 1..20: mol_type = other DNA
agtgggtacaaggattctat

SEQ ID NO: 3968 - DNA, 20 bp, synthetic construct
  source 1..20: mol_type = other DNA
gtgggtacaaggattctatt

SEQ ID NO: 3969 - DNA, 20 bp, synthetic construct
  source 1..20: mol_type = other DNA
tgggtacaaggattctattt

SEQ ID NO: 3970 - DNA, 20 bp, synthetic construct
  source 1..20: mol_type = other DNA
gggtacaaggattctatttg

SEQ ID NO: 3971 - DNA, 20 bp, synthetic construct
  source 1..20: mol_type = other DNA
ggtacaaggattctatttgg

SEQ ID NO: 3972 - DNA, 20 bp, synthetic construct
  source 1..20: mol_type = other DNA
gtacaaggattctatttgga

SEQ ID NO: 3973 - DNA, 20 bp, synthetic construct
  source 1..20: mol_type = other DNA
tacaaggattctatttggag

SEQ ID NO: 3974 - DNA, 20 bp, synthetic construct
  source 1..20: mol_type = other DNA
acaaggattctatttggagt

SEQ ID NO: 3975 - DNA, 20 bp, synthetic construct
  source 1..20: mol_type = other DNA
caaggattctatttggagtg

SEQ ID NO: 3976 - DNA, 20 bp, synthetic construct
  source 1..20: mol_type = other DNA
aaggattctatttggagtga

SEQ ID NO: 3977 - DNA, 20 bp, synthetic construct
  source 1..20: mol_type = other DNA
aggattctatttggagtgat

SEQ ID NO: 3978 - DNA, 20 bp, synthetic construct
  source 1..20: mol_type = other DNA
ggattctatttggagtgata

SEQ ID NO: 3979 - DNA, 20 bp, synthetic construct
  source 1..20: mol_type = other DNA
ctcaggcacagatgtaaaca

SEQ ID NO: 3980 - DNA, 20 bp, synthetic construct
  source 1..20: mol_type = other DNA
tcaggcacagatgtaaacag

SEQ ID NO: 3981 - DNA, 20 bp, synthetic construct
  source 1..20: mol_type = other DNA
cagttctgttagcccttggt

SEQ ID NO: 3982 - DNA, 20 bp, synthetic construct
  source 1..20: mol_type = other DNA
agttctgttagcccttggtg

SEQ ID NO: 3983 - DNA, 20 bp, synthetic construct
  source 1..20: mol_type = other DNA
gttctgttagcccttggtga

SEQ ID NO: 3984 - DNA, 20 bp, synthetic construct
  source 1..20: mol_type = other DNA
agagaggtggctgaactgct

SEQ ID NO: 3985 - DNA, 20 bp, synthetic construct
  source 1..20: mol_type = other DNA
cgagaacagtgagaccatgc

SEQ ID NO: 3986 - DNA, 16 bp, synthetic construct
  source 1..16: mol_type = other DNA
gcgccttcaactgtga

SEQ ID NO: 3987 - DNA, 16 bp, synthetic construct
  source 1..16: mol_type = other DNA
cgccttcaactgtgaa

SEQ ID NO: 3988 - DNA, 21 bp, synthetic construct
  source 1..21: mol_type = other DNA
  misc_feature 1..19: note = RNA
  misc_feature 20..21: note = DNA
caccggcagttattccaattt

SEQ ID NO: 3989 - DNA, 21 bp, synthetic construct
  source 1..21: mol_type = other DNA
  misc_feature 1..19: note = RNA
  misc_feature 20..21: note = DNA
ggctcagacagagaactcatt

SEQ ID NO: 3990 - DNA, 22 bp, synthetic construct
  source 1..22: mol_type = other DNA
atggcccgtgtcctatctattg

SEQ ID NO: 3991 - DNA, 20 bp, synthetic construct
  source 1..20: mol_type = other DNA
tttgggtgcttggggttttg